(19) United States
(12) Patent Application Publication
(10) Pub. No.: US 2014/0121123 A1
(43) Pub. Date: May 1, 2014

(54) METHODS FOR DIVERSIFYING ANTIBODIES, ANTIBODIES DERIVED THEREFROM AND USES THEREOF

(71) Applicants: Kevin Caili Wang, Palo Alto, CA (US); Yan Li, San Jose, CA (US); Mark Hsieh, San Mateo, CA (US); Xinwei Wang, Germantown, MD (US); Xinwei Wang, Germantown, MD (US); Feng Dong, Lansdale, PA (US); Peizhi (Peter) Luo, Lansdale, PA (US); Pingyu Zhong, Blue Bell, PA (US)

(72) Inventors: Kevin Caili Wang, Palo Alto, CA (US); Yan Li, San Jose, CA (US); Mark Hsieh, San Mateo, CA (US); Xinwei Wang, Germantown, MD (US); Xinwei Wang, Germantown, MD (US); Feng Dong, Lansdale, PA (US); Peizhi (Peter) Luo, Lansdale, PA (US); Pingyu Zhong, Blue Bell, PA (US)

(21) Appl. No.: 13/882,285

(22) PCT Filed: Oct. 24, 2011
(86) PCT No.: PCT/US11/57426

§ 371 Date: Oct. 15, 2013

Related U.S. Application Data
(60) Provisional application No. 61/408,393, filed on Oct. 29, 2010.

(51) Int. Cl. C12N 15/10

(52) U.S. Cl. CPC C12N 15/1055
USPC 506/9; 435/252.33; 435/320.1; 506/18; 506/23; 530/387.1; 536/23.53

(57) ABSTRACT

The invention provides methods of introducing diversity into antibody molecules comprising introducing or substituting at least one amino acid sequence in the CDR of the target antibody together with at least one amino acid in the FW region spanning the 3 amino acid adjoining the CRD on each side. The resulting diverse antibodies with variant CDRs and FW region sequences comprising diverse amino acid sequences are also described. These polypeptides regions, herein referred to as 3+CDR3+, that form the gist of the invention contribution described herein provide a flexible and simple source of sequence diversity that can be used as a source for expressing and identifying diverse antibodies or antigen binding polypeptides. Libraries comprising a plurality of these polypeptides are also provided. In addition, methods of and compositions for generating and using these polypeptides and libraries are provided. A method of producing diverse antibodies comprising amino acid substitutions in one of the CDR region and the FW region comprising 3 contiguous FW sequence amino acids adjacent to each CDR on either side is described herein. The substitutions are relative to database or germline sequences. Not all substitution are preserved in conservative regions.

[0001] The present application claims the benefit of U.S. provisional patent application No. 61/408,393, filed Oct. 29, 2010, which is herein incorporated by reference in its entirety.

### FIELD OF THE INVENTION

[0002] The invention generally relates to methods of increasing the overall diversity of a target antibody including libraries of diversified antibodies or antibody variable domains. The libraries include a plurality of different antibody variable domains generated by creating diversity in a heavy or light chain variable framework domain—the so called junctional region optionally with a mutation in one or more complementary determining regions (CDRs). The junctional region essentially comprises the three amino acids resident in the framework sequence juxtaposed to each CDR on either side. In particular, diversity in the junctional region together with the CDR region is designed to maximize antigen binding while minimizing the structural perturbations of the antibody variable domain. The invention also relates to fusion polypeptides of one or more antibody variable domain and a heterologous protein such as a coat protein of a virus. The invention also relates to replicable expression vectors which include a gene encoding the fusion polypeptide, host cells containing the expression vectors, a virus which displays the fusion polypeptide on the surface of the virus, libraries of the virus displaying a plurality of different fusion polypeptides on the surface of the virus and methods of using those compositions. The methods and compositions of the invention are useful for identifying novel antibodies and antibody variable domains that can be used therapeutically or as reagents.

### BACKGROUND OF THE INVENTION

[0003] Maintaining an arsenal against the unexpected requires diversity. The humoral immune response recognizes novel molecular surfaces by exposure to a vast repertoire of potential binding partners. When confronted with a novel antigen, the chance that any given antibody in the pool will bind is low. As such, it is primarily the diversity of the antibody repertoire that determines whether a specific complementary paratope will be recovered. Vertebrate organisms appear to be capable of synthesizing thousands of different antibody sequences, each presumably encoded by a different antibody gene. Vertebrates have achieved antibody diversity by several strategies. One is the maintenance of a large repertoire of germline V (variable) genes. The others are somatic processes that shuffle germline V genes and possibly introduce denovo sequence diversity. Gene conversion has also been suggested as a process in the creation and maintenance of antibody diversity. “Conversion and Antibody diversity—Annu. Rev. Biochem./989. 58:509-3/.

[0004] The vertebrate immune system can evolve antibodies capable of recognizing essentially any macromolecule with high affinity and specificity. Analyses of natural antibody sequences together with structural studies have been instrumental in revealing how antibodies work (Chothia et al., 1992, J. Mol. Biol., 227: 799-817; Kabat, 1982, Pharmacological Rev., 34: 23-38; Kabat, 1987, Sequences of Proteins of Immunological Interest (National Institutes of Health, Bethesda, Md.)). These studies have revealed that antigen recognition is primarily mediated by complementarity determining regions (CDRs) that are located at one end of the antibody variable domain and are connected by a .beta.-sheet framework (Wu & Kabat, 1970, J. Exp. Med., 132: 211-250; Kabat & Wu, 1971, Annals New York Acad. Sci., 190: 382-393). The sequence diversity of natural antibodies shows that the CDRs are hypervariable in comparison with the framework, and it is the CDR sequences that determine the antigen specificity of a particular antibody (Jones et al., 1986, Nature, 321: 522-5; Amit et al., 1986, Science, 233: 747-53). These studies have also revealed that the natural sequence diversity at most CDR positions is not completely random, as biases for particular amino acids occur in both a site-specific manner and in terms of overall CDR composition (Davies & Cohen, 1996, Proc. Natl. Acad. Sci. USA, 93: 7-12; Kabat et al., 1977, J. Biol. Chem., 252: 6609-16; Zemlin et al., 2003, J. Mol. Biol., 334: 733-49; Mian et al., 1991, J. Mol. Biol., 217: 133-51; Padlan, 1994, Mol. Immunol., 31: 169-217).

[0005] Studying the incredible capability of the mammalian adaptive immune system to generate and manipulate billions of different binding specificities (antibodies and T cell receptors) has been a fulcrum of modern immunology. The diversity of antibody variable domains is generated by several distinct genetic mechanisms (Zemlin et al., 2003; Bassing et al., 2002, Cell, 109: S45-55; Tonegawa, 1983, Nature, 302: 575-81; Padlan, 1997, Mol. Immunol., 34: 765-70; Wilson, 2000, J. Exp. Med., 191: 1881-94). Diversity is encoded in the collection of V genes in the germline and further generated through recombination of V, D and J segments in B cells. Recombination generates variability in amino acid content in all CDRs and variation in the length of the loop portion of CDR3. Finally, somatic hypermutation during the secondary immune response generates diversity throughout variable domains. When antibodies are generated by the immune system, sequence diversity of the variable domains is initially created by combinatorial shuffling of germline-encoded gene segments. After exposure to an antigen, lymphocytes with antigen recognition are selected and further somatic mutations in the V segments are generated, providing the basis for clonal selection for mutations that enhance the affinity of the antibody-antigen interactions. Antibody paratopes, the agents of humoral molecular recognition, mediate specific binding through a protein-antigen interface that varies dramatically between molecules. Antibody paratopes are found at the hypervariable region of a light and heavy chain heterodimer. The antigen-binding site comprises six complementarity determining regions (CDR); the hypervariable regions of the variable light chain (VL) and variable heavy chain (VH) each contribute three CDRs to the complete binding pocket (Kortt et al., 2001). Each chain contributes 3 loops to a spatial cluster of complementarity determining regions (CDRs). CDRs 1 and 2 are encoded in germline V-segment loci: 51 V_{H} and 70 V_{κ/λ} loci, each with unique amino acid encodings, exist in a typical human haplotype. Diversity in each chain is determined by combinatorial V_{H}-(D_{H})-J_{H} (for the heavy) or V_{κ/λ}-J_{κ/λ} (for the light) rearrangements, P and N-addition, junctional flexibility, and somatic hypermutation of variable domain nucleotides, with a concentration on CDR encoding regions. This series of events leads to the generation of the initial, naïve immune repertoire. The naïve repertoire is modified during the ‘educational stage’ of development of the adaptive immune system, and following antigenic stimulation by somatic mutations, receptor editing and further gene rearrangements result in mutated antibody genes that comprises an immune repertoire. The combinatorial association of such stochastically generated light and heavy chains has the potential to generate many orders of magnitude more diversity than can be uniquely displayed on the 10” B-cells in a single individual's lymphocyte population. With each antibody variable fragment (Fv) encoded by at least 650 base pairs, the presented repertoire is potentially 4 orders of magnitude larger than the entire human diploid genome (6.4×10⁹ bp). While these genetic mechanisms allow sufficient diversity to generate a biologically competent immune repertoire, they also likely constrain natural diversity as compared to the level of diversity created through a purely random process.

[0006] Antibodies (eg, IgG, which is the most commonly used immunoglobulin form) are unique proteins with dual functionality. All naturally occurring antibodies are multivalent, with IgG having two binding ‘arms.’ Antigen-binding specificity is encoded by three complementarity-determining regions (CDRs), while the Fc-region is responsible for binding to serum proteins (eg, complement) or cells. An antibody itself usually is not responsible for killing target cells, but instead marks the cells that other components or effector cells of the body's immune system should attack, or it can initiate signaling mechanisms in the targeted cell that leads to the cell's self-destruction. The former two attack mechanisms are referred to as antibody-dependent complement-mediated cytotoxicity (CMC) and antibody-dependent cellular cytotoxicity (ADCC). ADCC involves the recognition of the antibody by immune cells that engage the antibody-marked cells and either through their direct action, or through the recruitment of other cell types, lead to the tagged-cell's death. CMC is a process where a cascade of different complement proteins become activated, usually when several IgGs are in close proximity to each other, either with one direct outcome being cell lysis, or one indirect outcome being attracting other immune cells to this location for effector cell function. Antibodies, when bound to key substances found on the cell surface, also can induce cells to undergo programmed cell death, or apoptosis.

[0007] The ability of mAbs to bind with both high affinity and high specificity to molecular targets that are prevalent in a diseased condition, but not in normal cells, has been the foundation for choosing mAb therapeutics when conventional small molecule approaches have failed. The development of antibody therapeutics is a dynamic discipline that only seems to gain momentum as the technology matures. Indeed, the achievements of the past decade in antibody engineering rejuvenated the entire sector of drug development of biological compounds (Reichert et al., 2005). Two decades after the generation of the first mouse monoclonal antibodies (mAbs) by Köhler and Milstein, the first therapeutic antibody for a cancer indication was approved by the FDA for marketing in 1997. Technology improvements since then have provided several approaches to manufacturing human and humanized antibodies with high affinity for biologically relevant targets. Recombinant antibody fragments include the monovalent antibody fragments Fab, scFv, disulfide-stabilized Fv, single-domain VH, VhH, domain antibody and the multimeric formats, such as minibodies, bis-scFv, diabodies, triabodies and tetrabodies. Most of these formats have been used in antibody libraries. Minimal binding proteins, such as Fab, scFv, and single variable domains are the preferred targeting elements for some investigational drugs, with the scFv being by far the most common format used in recombinant antibody libraries, with Fab in second place. However, antibodies are large macromolecules that pose numerous challenges. While further improvements in discovery technologies, such as phage display, ribosome display, and transgenic animals continue to advance our capacity to rapidly screen and refine optimal binding molecules, antibody engineers have been focusing more of their efforts on improving protein production and stability, as well as engineering improved biological properties in the effector domains of monoclonal antibodies. Another challenge for mAb therapeutics that has not been realized is attempts at producing more diverse novel and known antibodies. Most strategies for anti-cancer therapies employ full length mAbs whose function supersedes target binding. Known mechanisms of action of marketed mAbs and other well characterized antibodies include: (1) antagonist action via blocking a cell receptor interaction with its ligand, (2) Fc domain based recruitment of immune cells to the targeted tissue and subsequent antibody-dependent cellular cytotoxicity (ADCC) or complement-dependent cytotoxicity (CDC), (3) receptor-mediated apoptosis, (4) receptor down regulation, and (5) delivery of radioisotopes or chemotherapeutic drugs in the context of mAb bioconjugates.

[0008] While traditional hybridoma technology, which relies on immunization of animals, is still the dominant source of antibodies, powerful combinatorial technologies have allowed for the development of in vitro immune repertoires and selection methodologies that can be used to derive antibodies without the need for direct immunization of a living host. These technologies are an attractive and expanding alternative to hybridoma technology, particularly for drug discovery and development, because they allow for the production of human proteins that are likely to show low immunogenicity. For the generation of diversity, antibody library technology have been designed to mimic the natural process and, if possible, surpass it by introducing sequence diversity that is alien to natural antibodies. Indeed, the discovery of antibodies for therapeutic, diagnostic, analytical or affinity chromatograph purposes and the process of generating antibodies with exquisitely tailored characteristics relies increasingly on the use of large combinatorial libraries encoding repertoires of antibody variants. Three distinct types of antibody libraries have been generated: (i) libraries that sample the antibody diversity available in immunized animals, (ii) libraries that mimic the diversity of the antibodies in non-immunized individuals and (iii) synthetic libraries. In the latter, control over both library design and selection conditions enables unprecedented precision in antibody engineering. Synthetic libraries have been used to gain insights into the mechanisms of antibody structure and function, to tackle particularly difficult therapeutic challenges and to expand the utility of antibodies to novel areas of research. As well, synthetic antibody libraries, in which the antigen-binding sites are entirely man-made, have come of age and now rival or even exceed the potential of natural immune repertoires. Using the latter approach, antibodies that recognize and bind to a target with the requisite affinity and specificity are isolated from a library by high throughput screening techniques such as phage, bacterial, yeast or ribosome display. Indeed, the sequence of one or more antibody scaffolds is diversified so that it encodes all or a subset of the 20 natural amino acids at multiple positions known to be critical for antigen recognition. The theoretical diversity of synthetic antibody libraries in which multiple hypervariable loops are randomized far exceeds practical limitations in library construction and screening.

[0009] The methods used to generate diversity are fundamentally different for natural and synthetic antibody libraries. In the case of natural repertoires, molecular biology techniques are used to amplify and clone pools of light- and heavy-chain variable domains directly from immune tissues. A major advantage of this approach is that it only requires knowledge of the antibody gene sequences, which are now readily available for many species, and most of the displayed antibodies are likely to be correctly folded, as they have been derived from lymphocytes producing functional antibodies. However, sequence diversity is limited to the scope of the natural immune system, and also, it has been found that natural antibodies vary tremendously in terms of expression and stability. Furthermore, although natural-repertoire libraries are a rich source of specific antibodies, affinity maturation or stability improvement of selected antibodies is often difficult, because of the undefined nature of the library. The generation of library diversity is in fact a two-tier process. The first level is during library construction. The second level involves modifying already isolated antibodies, usually with the purpose of increasing their affinity, which is also known as ‘in vitro affinity maturation’. Over the years, many approaches for introduction of diversity into pre-existing antibodies have been applied and can be divided into ‘targeted’ versus ‘non-targeted’ approaches. An excellent recent review of the latest technologies for the enhancement of antibody affinity appears in Wark et al., Adv. Drug. Deliv. Rev.; 58:657-670 (2006)

[0010] Targeted approaches introduce diversity into positions that are supposed to contribute to antigen binding. Examples include: CDR walking, as described above; CDR randomization, which is an extension of the former; hotspot mutagenesis, which introduces randomness in positions that frequently undergo mutagenesis during the natural process of affinity maturation]; and codon-based mutagenesis, which targets individual CDR positions based on structural information. See, for example, Itai Benhar, Expert Opin. Biol. Ther., 7>763-779 (2007) As noted in Benhar, supra, the extent to which the original antibody is diversified is usually dictated by the display platform as well as the ambition and foresight of the investigators.

[0011] Non-targeted approaches introduce sequence diversity at random throughout the antibody genes of the antibody. As a result, these appear to be much less ‘accurate’ and the process takes very large repertoires to obtain affinity-matured antibodies. Examples of non-targeted approaches for in vitro affinity maturation include error-prone PCR mutagenesis (introducing random mutations using a low-fidelity DNA polymerase during PCR amplification), antibody chain shuffling, DNA shuffling (sexual PCR, which is a process involving digesting mutant libraries of closely related DNA sequences with deoxyribonuclease I and reassembling them into shuffled intact fragments by primer-less PCR) and mutator E. coli strains (such as MutD5-FIT or XL-1 Red, which carry mutD. In addition to affinity maturation, secondary libraries have been built from existing antibodies to improve the properties that can be summed up in ‘robustness’. These include expression level, solubility and stability.

[0012] As noted supra, a particularly promising branch of in vitro antibody research is concerned with the development of ‘synthetic’ antibody libraries with antigen-binding sites constructed entirely from man-made diversity. Even within the in vitro antibody field, this represents a highly specialized area of research, as most libraries are derived by transferring natural antibody genes to in vitro display formats. This can be readily accomplished by using PCR to amplify functional antibody genes from immune tissues, and thus, library construction from natural repertoires is relatively facile, as it requires only knowledge of the genetic sequences encoding antibody diversity. In contrast, synthetic repertoires are not derived from natural antibody genes, but rather are built from scratch by introducing diversity with precisely designed synthetic DNA. The design of synthetic repertoires requires detailed structural and functional knowledge of the antibody molecule, and consequently the development of effective libraries of this type may prove to be considerably more difficult than the development of libraries from natural diversity. In spite of these shortcomings, research in the synthetic antibody field has been spurred by the numerous advantages that come with a high-precision approach. Over the last few years, these efforts have been rewarded with technical advances that have allowed the development of highly functional synthetic antibody libraries that rival or even exceed the recognition potential of natural immune systems. Effective in vitro libraries have been constructed using either the entire antigen-binding fragment (Fab), the single-chain variable fragment (scFv) consisting of the light- and heavy-chain variable domains (VL and VH), or the VH domain alone, which represents the smallest domain capable of mediating antigen recognition.

[0013] All the selection platforms have three features in common: phenotype (displayed antibody with antigen binding capability) and genotype are linked and co-selected; a selective pressure is applied to enrich antibodies having the desired properties from the entire population; and they need amplification of the enriched population following selection. The three major types of selection platforms for antibody libraries are phage display, cell display and ribosome display. Antibody arrays are starting to appear as appealing tools for high-throughput screening of antibody libraries for functional genomics. All in vitro display technologies depend on the establishment of a linkage between the displayed protein (phenotype) and the encoding DNA (genotype). Pools containing billions of unique antibodies can be subjected to selective pressure for antigen recognition, selected clones can be amplified and the displayed protein sequences can be decoded by sequencing of the linked DNA. Phage display libraries have been used to generate human antibodies from immunized and non-immunized humans, germ line sequences, or naive B cell Ig repertories (Barbas & Burton, Trends Biotech (1996), 14:230; Griffiths et al., EMBO J. (1994), 13:3245; Vaughan et al., Nat. Biotech. (1996), 14:309; Winter EP 0368 684 131).

[0014] Phage display libraries allow an antibody repertoire to be queried with a candidate antigen directly, without the need to proceed through in vivo immunization. A number of strategies for introducing repertoire diversity during library construction have been proposed Phage display is a powerful technique that has been utilized to identify novel antigen binding antibody variable domains. The ability to identify and isolate high affinity antibodies from a phage display library is important in isolating novel human antibodies for therapeutic use. Isolation of high affinity antibodies from a library is dependent on the size of the library, the efficiency of production in cells, and the diversity of the library. See, for e.g., Knappik et al., J. Mol. Biol. (1999), 296:57. The size of the library is decreased by inefficiency of production due to improper folding of the antibody or antigen binding protein and the presence of stop codons. Expression in bacterial cells can be inhibited if the antibody or antigen binding domain is not properly folded. In some cases, expression can be improved by mutating residues in turns at the surface of the variable/constant interface, or at selected CDR residues. (Deng et al., J. Biol. Chem. (1994), 269; 9533, Ulrich et al., PNAS (1995), 92:11907-11911; Forsberg et al., J. Biol. Chem. (1997), 272:12430). The sequence of the framework region is important in providing for proper folding when antibody phage libraries are produced in bacterial cells. However, not all strategies provide a library of diverse but structurally stable antibody variable domains.

[0015] Over the years, several alternative display platforms have been developed, and these include systems for display on yeast or bacterial cells, on retroviruses, or through linkage to mRNA or DNA. Naive, or nonimmune, antigen binding libraries have been generated using a variety of lymphoidal tissues. Some of these libraries are commercially available, such as those developed by Cambridge Antibody Technology and Morphosys (Vaughan et al., Nature Biotech 14:309 (1996); Knappik et al., J. Mol. Biol. 296:57 (1999)). However, many of these libraries have limited diversity.

[0016] As noted, supra, the ability to isolate binding specificities against a broad variety of antigenic determinants represents one of the most important pre-requisites for a library for most practical applications. Other desirable features include the ability to rapidly affinity mature antibody clones, if required for special applications, as well as the performance of individual antibody clones (expression yields, stability, solubility, oligomeric format, etc.). The size of antibody libraries (i.e., the number of antibody clones) is an important factor contributing to the successful isolation of good quality binders against a variety of different antigens. Furthermore, library design greatly contributes to the performance of the antibody selection process. For example, in phage display there is a limit to the number of phage that can be used in practical selection experiments, and the strategy chosen for library design and construction directly influences the percentage of functional clones in the library and the fraction of antibodies that are displayed on the phage as fusion to the minor coat protein pill. Modular libraries, e.g. synthetic libraries based on conserved antibody scaffolds, provide yet another alternative display mechanism and may facilitate the isolation of high affinity antibodies. However, the fraction of a library that is actually displayed as correctly folded antibodies is more difficult to assess and depends critically on the design principles employed for library construction.

[0017] A number of possible combinatorial antibody libraries can be considered, for example those derived from antibody genes amplified from peripheral blood lymphocytes with suitable oligonucleotide primers. By contrast, synthetic antibody libraries are constructed in the laboratory using carefully designed antibody gene segments. Combinatorial mutagenesis of judiciously chosen amino acid positions can be used to construct such synthetic libraries. The advantages and disadvantages of synthetic libraries are essentially opposite those of natural-repertoire libraries. With synthetic libraries, highly stable and well-expressed frameworks can be used to fortify the overall stability of library members, and design features can be incorporated to allow facile affinity maturation. For example, synthetic antibody libraries are particularly useful for practical pharmaceutical applications. First, the antibody genes in these libraries have never undergone negative selection in vivo against antigens present in an organism. Secondly, the design of the library allows a careful control of the genetic structural elements, which can be introduced in the library. Third, library construction can use certain antibody genes that confer certain beneficial properties such as excellent stability, expression, low immunogenicity, tolerance to amino acids substitution, and performance in selections. Last but not least, certain antibody genes are characterized by the fact that the corresponding protein is capable of binding to protein A, thus facilitating the purification of corresponding antibody fragments by affinity chromatography. The primary disadvantage of synthetic libraries resides in the fact that the introduction of synthetic diversity can lead to protein misfolding and aggregation, if inappropriate chemical diversity or structural sites are used in the library design. Synthetic antibody libraries are created by introducing degenerate, synthetic DNA into the regions encoding the complementarity-determining regions (CDRs) of defined variable-domain frameworks. The design of an antibody library begins with the generation of diversity, where a choice is made about the source of antibody-coding genes. The antibody genes, with or without added non-natural diversity, are than assembled into an intact expression format, most frequently a scFv or Fab. In the next step, the recombinant repertoire is mounted on a display platform for panning, such as phage or ribosome display, or a platform for screening, such as bacterial and yeast display. By applying a selective pressure, usually for binding affinity and specificity, individual antibodies are isolated from such primary libraries. Indeed, by varying the selection platform, different antibodies are isolated from identical gene repertoires. These are usually cloned into a more appropriate expression system in a format suitable for the downstream application. Antibody library technology is also used to reintroduce sequence diversity into existing antibodies that may be themselves library-derived or come from other sources, such as hybridomas, with the intent of optimizing them. The selection strategies are similar to those applied with primary libraries, but with secondary libraries it is more frequent to see selective pressure applied for robustness (stability, solubility, thermo tolerance, etc.). Antibody libraries have provided for a large part of the existing pipeline of potential antibody-based therapeutics, as well as diagnostics, and will no doubt continue to make a large contribution to antibody discovery and development in the future. All of these are physical selection methods and require significant quantities of the selector to perform selection and screening. In addition, systems have also been developed for in vivo selections inside bacteria or yeast. Each of these systems has advantages and disadvantages that make them more or less suitable for particular applications, and the relative merits of the different technologies have been described elsewhere.

[0018] Several groups have constructed synthetic antibody libraries that are capable of generating high-affinity antibodies against a wide variety of antigens. First, the diversities of the newer libraries greatly exceed those of earlier examples, and it has been shown that naive repertoires that contain greater than a billion unique members are sufficient, and likely necessary, for generating antibodies with affinities in the nanomolar range. A second improvement has been the expansion of synthetic diversity beyond CDR-H3 (the major binding determinant in most antibodies) to additional CDR loops in both the heavy and light chains. Additional improvements have also been made by using advanced mutagenesis methods that allow for the introduction of highly precise, tailored diversity designed to mimic the types of amino acids that are abundant in natural antigen-binding sites. Indeed, some researchers have attempted to obtain the best of both worlds by constructing semi-synthetic libraries that combine synthetic diversity in some CDR loops with natural diversity in others. A better understanding of the contributions of the framework regions to antigen recognition has also been useful, but this knowledge has led to different schools of thought on how best to optimize frameworks.

[0019] Some groups have chosen to reduce the frameworks to a limited number or even a single, highly stable VH/VL pair, believing that this is likely to lead to stable and well-behaved antibodies. The single framework option also has the advantage of simplicity for library design, construction and analysis. In contrast, other researchers hold the opinion that increased framework diversity provides a greater diversity of antibody function, and thus libraries containing multiple combinations of VH and VL frameworks have also been constructed. At present, it is not clear which of these strategies for framework and CDR design is preferable.

[0020] Generating a diverse library of antibodies or antigen binding proteins is also important to isolation of high affinity antibodies. Libraries with diversification in limited CDRs have been generated using a variety of approaches. See, e.g., Tomlinson, Nature Biotech. (2000), 18:989-994. CDR3 regions are of interest in part because they often are found to participate in antigen binding. CDR3 regions on the heavy chain vary greatly in size, sequence and structural conformation, Others have also generated diversity by randomizing CDR regions of the variable heavy and light chains using all 20 amino acids at each position. It was thought that using all 20 amino acids would result in a large diversity of sequences of variant antibodies and increase the chance of identifying novel antibodies. (Barbas, PNAS 91:3809 (1994); Yelton, D E, J. Immunology, 155:1994 (1995); Jackson, J. R., J. Immunology, 154:3310 (1995) and Hawkins, R E, J. Mol. Biology, 226:889 (1992)).

[0021] Synthetic antibody libraries have also been used to explore the principles governing antigen recognition. Natural CDR sequences are highly diverse, but they are biased in favor of tyrosine and serine. According to Sidhu et al., their results showed that tyrosine was particularly well-suited to mediate productive interactions with antigen, especially when combined with small serine residues which likely have an auxiliary role by providing space and flexibility. The binary binding sites according to the authors represented a minimal benchmark into which additional diversity could be introduced to study antigen recognition in detail. Sidhu et al., Nature Chemical Biology, Vol. 2, December 2006, pp. 682-688.

[0022] There have also been attempts to create diversity by restricting the group of amino acid substitutions in some CDRs to reflect the amino acid distribution in naturally occurring antibodies. See, Garrard & Henner, Gene (1993), 128:103; Knappik et al., J. Mol. Biol. (1999), 296:57. However, these attempts have had varying success and have not been applied in a systematic and quantitative manner. Creating diversity in the CDR regions while minimizing the number of amino acid changes has been a challenge. Furthermore, in some instances, once a first library has been generated according to one set of criteria, it may be desirable to further enhance the diversity of the first library. However, this requires that the first library has sufficient diversity and yet remain sufficiently small in size such that further diversity can be introduced without substantially exceeding practical limitations such as yield, etc. There have also been attempts to create diversity by restricting the group of amino acid substitutions in some CDRs to reflect the amino acid distribution in naturally occurring antibodies. See, Garrard & Denner, Gene (1993), 128:103; Knappik et al., J. Mol. Biol. (1999), 296:57. However, these attempts have had varying success and have not been applied in a systematic and quantitative manner. Creating diversity in the CDR regions while minimizing the number of amino acid changes has been a challenge. As well, some groups have reported theoretical and experimental analyses of the minimum number of amino acid repertoire that is needed for generating proteins. However, these analyses have generally been limited in scope and nature, and substantial skepticism and questions remain regarding the feasibility of generating polypeptides having complex functions using a restricted set of amino acid types. See, e.g., Riddle et al., Nat. Struct. Biol. (1997), 4(10):805-809; Shang et al., Proc. Natl. Acad. Sci. USA (1994), 91:8373-8377; Heinz et al., Proc. Natl. Acad. Sci. USA (1992), 89:3751-3755; Regan & Degrado, Science (1988), 241:976-978; Kamteker et al., Science (1993), 262:1680-1685; Wang & Wang, Nat. Struct. Biol. (1999), 6(11):1033-1038; Xiong et al., Proc. Natl. Acad. Sci. USA (1995), 92:6349-6353; Heinz et al., Proc, Natl. Acad. Sci. USA (1992), 89:3751-3755; Cannata et al., Bioinformatics (2002), 18(8):1102-1108; Davidson et al., Nat. Struct. Biol. (1995), 2(10):856-863; Murphy et al., Prot. Eng. (2000), 13(3):149-152; Brown & Sauer, Proc. Natl. Acad. Sci. USA (1999), 96:1983-1988; Akanuma et al., Proc. Natl. Acad. Sci. (2002), 99(21):13549-13553; Chan, Nat. Struct. Biol. (1999), 6(11):994-996.

[0023] Library approaches have also utilized as a tool for antibody humanization. Basically, antibody humanization often requires the replacement of key residues in the framework regions with corresponding residues from the parent non-human antibody. These changes are in addition to grafting the antigen-binding loops. Assessment of which framework changes are beneficial to antigen binding usually requires the analysis of many different antibody mutants.

[0024] The goal of antibody humanization is to engineer a monoclonal antibody (MAb) raised in a nonhuman species into one that is less immunogenic when administered to humans. The development of this technology drastically transformed the stagnant state of antibody therapeutics in the 1980s, when the major obstacle was the human anti-murine antibody (HAMA) response. The HAMA response occurred in up to 50% of patients upon the administration of murine hybridoma-derived antibodies and severely compromised the safety, efficacy, and biological half-life of these reagents. In addition, murine antibody constant regions are inefficient in directing suitable human immune effector functions for therapeutic effects. Efforts to produce human antibodies by hybridoma technology and Epstein-Barr virus (EBV)-mediated B-lymphocyte transformation have met with limited success but their widespread application is hampered by the lack of robust human hybridoma fusion partners and the instability of EBV-transformed clones, respectively. Consequently, humanization technology was well-placed to exploit the plethora of murine MAbs against a variety of disease targets and turn them into effective clinical reagents.

[0025] Two methods were developed in the mid-1980s as attempts to reduce the immunogenicity of murine antibodies: chimerization (yielding Chimeric antibodies) and humanization by CDR grafting In mouse/human chimeric antibodies, the immunogenic murine constant domains (66% of total sequence) are replaced by the human counterpart to reduce the likelihood of eliciting the HAMA response. At the same time, intact murine variable domains are preserved to maintain the intrinsic antigen-binding affinity. Effector functions of chimeric antibodies may also be programmed by choosing constant domains of different human immunoglobulin isotypes.

[0026] An alternative approach designated “complementarity-determining region (CDR) grafting technology” pioneered by Dr. Greg Winter and colleagues at the Medical Research Council, Cambridge proposed transferring the antigen-binding specificity of a murine antibody to a human antibody by replacing the CDR loops and selected variable-region framework residues (FR). Since greater than 90% of the original murine residues are replaced by residues of human origin, one hopes that the immunogenicity is greatly reduced. However, because the affinity for an antigen is controlled by both the CDR sequences and their conformations, changes in the framework might that might affect antigen affinity wee also proposed. Since, the reshaped, humanized antibody only retained the essential binding elements from the murine antibody (5-10% of total sequence) it was predicted to be minimally immunogenic. Indeed, the in vivo tolerance and efficacy of many humanized antibodies have been shown to be more favorable than murine antibodies. Depending on the original antibody, the mouse and human FR sequences can differ at 5-50 positions per chain. Many of these changes are at exposed sites well removed from the CDRs and thus would not affect CDR conformation. Differences that occur at FR sites contacting one or more residues of the CDR do, however, have the potential to alter antigen affinity. The importance of these residues was postulated by Chothia and Lesk. In general, if the murine and human sequences differ at these important positions, the human residue in the framework should be replaced by the original murine residue to maintain the original murine CDR conformation. The meaning of the term reshaping has grown from simple CDR grafting to encompas the grafting of both CDRs and CDR contact regions One approach to minimize this problem is to select as a scaffold a human framework that is as homologous as possible to the original murine framework, especially at the CDR-contact regions. These frameworks can be selected from known structures, known VH/VL pairs, single mature sequences, germline sequences or even synthetically constructed subgroup consensus sequences. Typically, up to five further changes in the framework region are required for activity to be restored to within threefold that of the original antibody. The greater the similarity between the two framework sequences, the less likely it is that a key framework residue will need to be changed. Further changes sometimes involve the elimination of residues that rarely occur in human antibodies. The rationale for this approach is to eliminate potential immunogenicity, but recent results demonstrate that the presence of such rare residues can also have effects on the stability, and possibly the amyloidgenicity, of the variable domains.

[0027] The key to a successful CDR grafting experiment lies in the preservation of the murine CDR conformations in the reshaped antibody for antigen binding. This can benefit from a detailed analysis of the structure and sequence of the murine Fv. The antibody Fv region comprises variable domains from the light chain (VL) and heavy chain (VH) and confers antibodies with antigen-binding specificity and affinity. The variable domains adopt the immunoglobulin fold in which two antiparallel beta-sheet framework scaffolds support three hypervariable CDRs. Structural variation between antibodies is dependent on the length, sequence, conformation, and relative disposition of the CDRs, and the pairing of CDRs from repertoires of VL and VH sequences. These parameters create the unique topography of each combining site and form the basis for specific antigen recognition. Although antigen binding is predominantly regulated by CDR residues, framework residues may also contribute, either through direct antigen contact (22) or indirectly through packing with CDR residues. The implication for CDR grafting is that it may be necessary to revert one or more human framework residues to the murine equivalents in the reshaped antibody (so-called framework back-mutations; see FIG. 1B) to restore the native biomolecular environment for antigen binding (13). Benny K. C. Lo; Methods in Molecular Biology, Vol. 248: Antibody Engineering: Methods and Protocols Edited by: B. K. C. Lo© Humana Press Inc., Totowa, N.J.

[0028] The news media is littered with recent setbacks relative to therapeutic antibodies for use in humans, prompting greater attention to the identification and selection of therapeutic antibodies going forward. A phase I clinical trial in the UK of the CD28 targeted mAb, TGN1412, led to disaster as six healthy volunteers were admitted to intensive care (Sheridan, 2006a C. Sheridan, TeGenero fiasco prompts regulatory rethink, Nat. Biotechnol. 24 (2006), pp. 475-476. Although immune cells and their modulators are very appealing targets for mAbs (Korman et al., 2006), there are inevitable perils associated with intervention of the immune signaling network. It remains to be seen whether a CD28 targeted drug could ultimately prove to be useful in immunosuppressed individuals, which is the patient population initially proposed to benefit from this therapeutic. In a separate case, Tysabri is a mAb targeting the α4-subunit of α4β1 and α4β7 integrins, thereby inhibiting β4 mediated adhesion to receptors on endothelial cells (Bartt, 2006). Tysabri first entered the market for therapy of relapsing forms of MS in 2004. However, when three patients developed progressive multifocal leukoencephalopathy (PML), the drug was withdrawn. After subsequent clinical trials and further FDA review, Tysabri returned to the market in 2006 under a special restricted distribution program (Sheridan, 2006a and Sheridan, 2006b). In this context, PML is also one risk factor that is recorded on the label for the blockbuster anti-CD20 mAb drug,

[0029] Thus, there remains a need to improve methods of generating diverse antibodies including antibody libraries that comprise functional polypeptides having a sufficient degree of sequence diversity, yet are sufficiently amenable for further manipulations directed at further diversification etc. The invention described herein meets this need and provides other benefits.

[0030] In fact, contray to the teachings of the art, supra, the invention provides a flexible and simple source of sequence diversity that can be used as a source for expressing and identifying diverse antibodies or antigen binding polypeptides. The method proposes diversifying antibody sequences by specifically introducing amino acid substitutions, additions, deletions or mutation in one of three framework amino acid sequences adjacent to a CDR sequence and/or optionally introducing amino acid substitutions, deletions, additions or mutations in specific amino acid residues contained within a CDR region.

### SUMMARY OF THE INVENTION

[0031] The present invention provides methods of systematically and efficiently generating polypeptides (e.g. variant antibody) comprising diversified FR and/or CDRs. Unlike conventional methods that propose that adequate diversity of target binders can be generated only if a particular CDR(s), or all CDRs should be diversified, and unlike conventional notions that adequate diversity is dependent upon the broadest range of amino acid substitutions (generally by substitution using all or most of the 20 amino acids) and unlike conventional notions that prohibit diversifying framework residues closest to the CDR as a means of introducing diversity in an antibody, the invention provides methods capable of generating high quality target binders e.g., antibodies that are not necessarily dependent upon diversifying a particular CDR(s) or a particular number of CDRs of a reference polypeptide or source antibody.

[0032] Indeed, the invention is based, at least in part, on the surprising and unexpected findings that highly diverse libraries of high quality antibodies can be generated inter alia by limiting the diversity at amino acid positions limited to three amino acids in the framework region adjoining or adjacent to a CDR sequence on at least one of the heavy and/or light chain together with or optionally with a variation in at least one CDR region on another one of the heavy or light chain. Preferably, the diversity comprises diversifying at least one of three framework residues in at least one of the two regions that envelope/surround each CDR. Methods of the invention are convenient, based on objective and systematic criteria, and rapid. The methods and polypeptides of the invention are useful in the isolation of high affinity binding molecules to target antigens and to provide for well folded antibody variable domains that can readily be adapted to large scale production. The restricted sequence diversity, and thus generally smaller size of the populations (e.g., libraries) of antibody polypeptides generated by methods of the invention allows for further diversification of these populations, where necessary or desired. This is an advantage generally not provided by conventional methods. Candidate binder polypeptides generated by the invention possess high-quality target binding characteristics and have structural characteristics that provide for high yield of production in cell culture. The invention provides methods for generating these binder polypeptides, methods for using these polypeptides, and compositions comprising the same.

[0033] One aspect of the invention involves generating a plurality of antibody variable domains that have at least a portion of a framework region that is diversified wherein this region is limited to 3 continuous/contiguous amino acids adjoining each CDR on each side. For clarity, if assuming arguendo, the target antibody comprises CDR1 on the light chain (CDRL1) as being defined by a sequence of amino acids starting at position 8 and ending at position 14, then the methods of the invention propose in certain embodiments, increasing diversity by introducing an amino acid substitution, addition, deletion or mutation either inside the CDR defined by positions 8-14 or in addition to the CDR, substituting, adding, deleting or mutating an amino acid in least one of the framework residue defined by the three amino acids (junctional region) in the framework sequence defined by amino acids at positions 5-7 (3+) and/or 15-17 (3+). In some embodiments, the framework region residues are those residues that are solvent accessible and may form part of an antigen binding domain or loop. For clarity, the junctional region comprises each of the 3 contiguous amino acid s adjoining each CDR on one or both sides. Said another way, the CDR according to the invention thus encompasses and includes the 3 contiguous amino acids on either side of each CDR-junctional region.

[0034] In naturally occurring antibody variable domains, the CDRs participate in antigen binding and vary between antibodies. The framework regions form β sheet structures that help to form the antigen binding pocket and typically have less diversity. An antibody antigen-binding site composed of a VH domain and a VL domain is typically formed by six loops of polypeptide: three from the VL and three from the VH. Analysis of antibodies of known atomic structure has elucidated relationships between the sequence and three-dimensional structure of antibody combining sites. These relationships imply that, except for the third region (loop) in VH domains, binding site loops have one of a small number of main-chain conformations: canonical structures. The canonical structure formed in a particular loop has been shown to be determined by its size and the presence of certain residues at key sites in both the loop and in framework regions.

[0035] A broad aspect of the invention provides for variant antibodies and antigen variable domains and compositions thereof prepared according to the methods of the invention, polynucleotides encoding the polypeptides and antigen variable domains prepared according to the methods of the invention, replicable expression vectors containing the polynucleotides, and host cells containing the vectors. In an embodiment, a plurality of the vectors encodes a library of a plurality of polypeptides or antigen binding domains of the invention. In a further embodiment, a virus displays on its surface the plurality of polypeptides or antigen binding domains encoded by the vectors. The methods of the invention are useful for identifying novel polypeptides, antibody, antibody fragments, and antibody variable domains that may be used therapeutically or as reagents.

[0036] The invention is based, at least in part, on the surprising and unexpected finding that highly diverse libraries of high quality comprising functional polypeptides capable of binding target antigens can be generated by diversifying a minimal number of amino acid positions with a highly restricted number of amino acid residues. Methods of the invention are rapid, convenient and flexible, based on using restricted codon sets that encode a low number of amino acids.

[0037] In one aspect, the invention provides a variant antibody or fragment thereof comprising at least one variably mutated domain.

[0038] In another aspect of the invention, a method is provided for selecting antibody against an antigen in vitro. The method comprises: contacting a library of antibodies with an antigen that is a fusion protein between a peptide fragment of a target membrane protein and a heterologous chaperon protein that stabilizes the peptide fragment; and selecting the antibodies that bind to the antigen.

[0039] By variably mutated it is meant that different antibody molecules in the library have different mutations at those residues. A residue position in the JR, VH or VL domain is variably mutated if different residues are present at that position when the library is considered as a whole. For example there may be at least 2, at least 4, at least 10, at least 15 or at least 20 different residues at a variably mutated position in the library. The different residues at variably mutated positions may comprise non-germline residues, or in some cases may consist only of non-germline residues. Variability may be achieved by random or targeted mutation of the residues. Techniques such as site directed mutagenesis and error prone PCR may be used to produce variable mutation. Oligonucleotide primers may be used in which the codons corresponding to variably mutated residues are designed with the first two bases in each triplet being each selected from A, T, C and G, and the third base of each triplet selected from T and G only. Stop codons TAA and TGA are therefore not encoded.

[0040] One aspect of the invention is a library of antibody molecules, wherein each antibody molecule comprises a variant VH domain consisting of a set of VH complementarity determining regions CDR1, CDR2 and CDR3, and at least one framework region, wherein the VII domain amino acid sequence corresponds to a human germline antibody heavy chain sequence in which a residue in VH CDR1, CDR2 and/or CDR3 is variably mutated from germline in addition to a variable mutation in at least one junctional region. In certain embodiments, the JR is left untouched. In another embodiments, the CDR is left untouched and only the JR is diversified—variably mutated.

[0041] The invention also provides a library of antibody molecules wherein each antibody molecule comprises a VH domain, and optionally a VL domain forming a VH-VL domain pair, where sequence diversity in the VH complementarity determining regions is restricted to the JR region adjoining each CDR and optionally diversifying at least one CDR and sequence diversity in the VL complementarity determining regions is restricted to one of CDR1, CDr2 or CDR3. Other residues in the VH and VL domain CDRs may be germline residues and/or may be the same in all or most (e.g. at least 90%) of the antibody molecules in the library. VH and VL domain framework regions may be human germline framework regions.

[0042] In some embodiments, the amino acid residues in the JR can be varied randomly. In some embodiments, these amino acid positions can be substituted randomly using a codon set that encode all amino acids. In other embodiments, the variant amino acids can be encoded by a nonrandom codon set.

[0043] The antibodies of the invention may comprise an antibody variable domain, an antibody or antibody fragment. The antibody fragment may be a Fab, F(ab′).sub.2, scFv, or Fv.

[0044] The invention also provides polynucleotides encoding the polypeptides and antigen binding domains of the invention, replicable expression vectors containing the polynucleotides, and host cells containing the vectors. In an embodiment, a plurality of the vectors encodes a library of a plurality of polypeptides or antigen binding domains of the invention. In a further embodiment, a virus displays on its surface the plurality of polypeptides or antigen binding domains encoded by the vectors.

[0045] Another aspect of the invention includes methods of generating a plurality of polypeptides that have variant framework residues (junctional region residues). A method comprises generating a plurality of antibody variable domains, each antibody variable domain comprising a variant JR, said method comprising: a) replacing an amino acid in at least one amino acid position at the N terminus of the JR with from 1-8 different amino acids; b) replacing an amino acid in at least one amino acid position at the C terminus of the JR with from 1-12, or from 1-8 amino acids and optionally c) replacing an amino acid in at least one amino acid position within a CDR region.

[0046] In some embodiments, the method may optionally include steps for generating polypeptides with variant CDR1, CDR2 or CDR3. The method includes identifying at least one CDR amino acid position that form(s) a loop of an antigen binding pocket; and generating a population of antibody polypeptides with a variant CDR1, CDR2 and/or CDR3 region by replacing the amino acid at said position with about Ito 8, preferably 1-6 of the most commonly occurring amino acids at that position in a randomly generated population and/or replacing the amino acid position with any of the naturally occurring amino acids or with a set of amino acids encoded by a nonrandom codon set to generate a population of polypeptides with different amino acid sequences in one of CDR1, CDR2 or CDr3.

[0047] In one aspect, the invention provides fusion polypeptides comprising diversified CDR(s) and/or JR's and a heterologous polypeptide sequence (in certain embodiments, that of at least a portion of a viral polypeptide), as single polypeptides and as a member of a plurality of unique individual polypeptides that are candidate binders to targets of interest. Compositions (such as libraries) comprising such polypeptides find use in a variety of applications, for example, as pools of candidate immunoglobulin polypeptides (for example, antibodies and antibody fragments) that bind to targets of interest. Such antibodies may also be generated using non-immunoglobulin scaffolds (for example, proteins, such as human growth hormone, etc.).

[0048] In one aspect, the antibodies comprise at least one variant CDR in its variable domains optionally with a variant JR, wherein the variant CDR comprises at least one variant amino acid in a highly diverse amino acid position, wherein at least 70% of the amino acids are target amino acids for that position in known antibody variable domains. The antibody may have a heavy chain variable domain which comprises at least 1, 2 or 3 variant CDRs selected from the group consisting of CDR H1, H2 and H3 in addition to a variant JR. The antibody may also have a light chain variable domain which comprises at least one JR optionally with 1, 2 or 3 variant CDRs selected from the group consisting of CDR L1 L2 and L3.

[0049] Also contemplated are variants of the diversified antibodies with improved binding affinities to its natural binding partner of human or non-human species, or both. Various forms of the antibody and variants thereof are contemplated herein. For example, the antibody mutant may be a full length antibody (e.g. having a human immunoglobulin constant region) or an antibody fragment (e.g. a Fab or F(ab′).sub.2). Furthermore, the antibody mutant may be labeled with a detectable label, immobilized on a solid phase and/or conjugated with a heterologous compound (such as a cytotoxic agent).

[0050] In one aspect, the invention provides a method of generating an antibody polypeptide comprising at least one variant JR and at least one, two, three, four, five or all variant CDRs selected from the group consisting of H1, H2, H3, L1, L2 and L3, wherein said antibody is capable of binding a target antigen of interest, said method comprising identifying at least one (or any number up to all) solvent accessible and highly diverse amino acid position in a reference CDR corresponding to the variant CDR; and (ii) varying the amino acid at the solvent accessible and high diverse position by generating variant copies of the CDR using a restricted codon set. A similar method applied to a variant JR.

[0051] In another example, the invention provides a method comprising: constructing a library of phage or phagemid particles displaying a plurality of polypeptides of the invention; contacting the library of particles with a target antigen under conditions suitable for binding of the particles to the target antigen; and separating the particles that bind from those that do not bind to the target antigen.

[0052] Designing diversity in CDRs may involve designing diversity in the length and/or in sequence of the CDR. For example, CDRH3 may be diversified in length to be, e.g., 7 to 21 amino acids in length, and/or in its sequence, for example by varying highly diverse and/or solvent accessible positions with amino acids encoded by a restricted codon set. In some embodiments, a portion of CDRH3 has a length ranging from 5 to 21, 7 to 20, 9 to 15, or 11 to 13 amino acids, and has a variant amino acid at one or more positions encoded by a restricted codon set that encodes a limited number of amino acids such as codon sets encoding no more than 19, 15, 10, 8, 6, 4 or 2 amino acids.

[0053] In some embodiments, polypeptides of the invention can be in a variety of forms as long as the target binding function of the polypeptides is retained. In some embodiments, a polypeptide of the invention is a fusion polypeptide (i.e. a fusion of two or more sequences from heterologous polypeptides). Polypeptides with diversified CDRs according to the invention can be prepared as fusion polypeptides to at least a portion of a viral coat protein, for example, for use in phage display. Viral coat proteins that can be used for display of the polypeptides of the invention comprise protein p III, major coat protein pVIII, Soc (T4 phage), Hoc (T4 phage), gpD (lambda phage), pVI, or variants or fragments thereof. In some embodiments, the fusion polypeptide is fused to at least a portion of a viral coat protein, such as a viral coat protein selected from the group consisting of pill, pvIII, Soc, Hoc, gpD, pVI, and variants or fragments thereof.

[0054] In some embodiments, in which the polypeptide with diversified CDRs is one or more antibody variable domains, the antibody variable domains can be displayed on the surface of the virus in a variety of formats including ScFv, Fab, SeFv.sub.2, F(ab′).sub.2 and F(ab).sub.2.

[0055] For display of the polypeptides in bivalent manner, the fusion protein in certain embodiments includes a dimerization domain. The dimerization domain can comprise a dimerization sequence and/or a sequence comprising one or more cysteine residues. The dimerization domain can be linked, directly or indirectly, to the C-terminal end of a heavy chain variable or constant domain (e.g., CH1). The structure of the dimerization domain can be varied depending on whether the antibody variable domain is produced as a fusion protein component with the viral coat protein component (e.g., without an amber stop codon after dimerization domain) or whether the antibody variable domain is produced predominantly without the viral coat protein component (e.g., with an amber stop codon after dimerization domain). When the antibody variable domain is produced predominantly as a fusion protein with the viral coat protein component, one or more disulfide bonds and/or a single dimerization sequence provides for bivalent display. For antibody variable domains predominantly produced without being fused to a viral coat protein component (e.g. with an amber stop codon), the dimerization domain can comprise both a cysteine residue and a dimerization sequence.

[0056] In addition, optionally, a fusion polypeptide can comprise a tag that may be useful in purification, detection and/or screening such as FLAG, poly-his, gD tag, c-myc, fluorescence protein or B-galactosidase. In one embodiment, a fusion polypeptide comprises a light chain variable or constant domain fused to a polypeptide tag.

[0057] In another aspect of the invention, a polypeptide such as an antibody variable domain is obtained from a single source or template molecule. The source or template molecule can be selected or designed for characteristics such as good yield and stability when produced in prokaryotic or eukaryotic cell culture, and/or to accommodate CDR regions of varying lengths. The sequence of the template molecule can be altered to improve folding and/or display of the variable domain when presented as a fusion protein with a phage coat protein component. For example, a source antibody may comprise the amino acid sequence of the variable domains of humanized antibody PCSK9. For example, in an antibody variable domain of a heavy or light chain, framework region residues can be modified or altered from the source or template molecule to improve folding, yield, display or affinity of the antibody variable domain. In some embodiments, framework residues may be selected to be modified from the source or template molecule when the amino acid in the framework position of the source molecule is different from the amino acid or amino acids commonly found at that position in naturally occurring antibodies or in a subgroup consensus sequence. The amino acids at those positions can be changed to the amino acids most commonly found in the naturally occurring antibodies or in a subgroup consensus sequence at that position.

[0058] The methods of the invention provide populations of variant antibodies (for example, libraries of antibody variable domains with one or more diversified junctional regions in addition to or optionally with at least one variant CDR region. The variant junctional region may comprise the region at the N terminal of the CDR region and/or C terminal of the CDR region or a combination of both. These libraries are sorted (selected) and/or screened to identify high affinity binders to a target antigen. In one aspect, antibodies from the library are selected for binding to target antigens, and for affinity. The variant antibodies selected using one or more of these selection strategies, may then be screened for affinity and/or for specificity (binding only to target antigen and not to non-target antigens). Methods of the invention are capable of generating a large variety of antibody sequences comprising a diverse set of CDR and/or JR sequences. In an embodiment, a one or more libraries are formed using the methods of the invention as described herein. The libraries are screened for binding to a target antigen, e.g. human Her3, PCSK9 etc.

[0059] Immunoglobulin heavy chain variable domains randomized to provide diversity are provided.

[0060] In another embodiment, a method of generating a composition comprising a plurality of polypeptides is provided, comprising: (a) generating a plurality of polypeptides comprising: an amino acid substitution in a framework sequence optionally with at least one or more additional substitutions in s CDR region on one of a heavy or light chain.

[0061] In one aspect, the plurality of polypeptides are encoded by a plurality of polynucleotides.

[0062] In a broad aspect, a method of the invention comprises generating a plurality of variant antibodies with one or more diversified JR and/or CDR regions, sorting the plurality of variant antibodies for binders to a target antigen by contacting the plurality of variant antibodies with a target antigen under conditions suitable for binding; separating the binders to the target antigen from those that do not bind; isolating the binders; and identifying the high affinity binders (or any binders having a desired binding affinity). The affinity of the binders that bind to the target antigen can be determined using a variety of techniques known in the art, for example, competition ELISA such as described herein. Optionally, the polypeptides can be fused to a polypeptide tag, such as gD, poly his or FLAG, which can be used to sort binders in combination with sorting for the target antigen.

[0063] Another general embodiment provides a method of isolating or selecting for an antibody variable domain that binds to a target antigen from a library of antibody variable domains, said method comprising: a) contacting a population comprising a plurality of variant antibodies of the invention with an immobilized target antigen under conditions suitable for binding to isolate target antigen antibody binders; b) separating the binders from nonbinders, and eluting the binders from the target antigen; c) optionally, repeating steps a-b at least once (in some embodiments, at least twice).

[0064] In some embodiments, a method may further comprise: d) incubating the polypeptide binders with a concentration of labeled target antigen in the range of 0.1 nM to 1000 nM under conditions suitable for binding to form a mixture; e) contacting the mixture with an immobilized agent that binds to the label on the target antigen; f) eluting the binders from the labeled target antigen; g) optionally, repeating steps d) to f) at least once (in some embodiments, at least twice), using a successively lower concentration of labeled target antigen each time. Optionally, the method may comprise adding an excess of unlabelled target antigen to the mixture and incubating for a period of time sufficient to elute low affinity binders from the labeled target antigen.

[0065] In one embodiment, a method of generating one or more of variant antibodies comprising at least one framework sequence which differs from a wild type sequence and at least one, two, three, four, five or all variant CDRs selected from the group consisting of H1, H2, H3, L1, L2 and L3, wherein said antibody is capable of binding a target antigen of interest is provided, comprising: (a) constructing an expression vector comprising a polynucleotide sequence which encodes a light chain variable domain, a heavy chain variable domain, or both of a source antibody comprising at least one, two, three, four, five or all CDRs of the source antibody selected from the group consisting of CDRL1, CDRL2, CDRL3, CDRH1, CDRH2, and CDRH3 and at least one framework sequence; and (b) mutating at least one, two three, four, five or all CDRs of the source antibody and said one framework sequence to generate one or more of the above-described hypervariable regions.

[0066] The invention also includes a method of screening a population comprising a plurality of polypeptides of the invention, said method generally comprising: a) incubating a first sample of the population of variant antibodies with a target antigen under conditions suitable for binding of the variant antibodies to the target antigen; b) subjecting a second sample of the population of variant antibodies to a similar incubation but in the absence of the target antigen; (c) contacting each of the first and second sample with immobilized target antigen under conditions suitable for binding of the variant antibodies to the immobilized target antigen; d) detecting amount of variant antibodies bound to immobilized target antigen for each sample; e) determining affinity of a particular variant antibody for the target antigen by calculating the ratio of the amount of the particular variant antibody that is bound in the first sample over the amount of the particular variant antibody that is bound in the second sample.

[0067] The libraries generated as described herein may also be screened for binding to a specific target and for lack of binding to nontarget antigens. In one aspect, the invention provides a method of screening for a variant antibody, such as an antibody variable domain of the invention, that binds to a specific target antigen from a library of antibody variable domains, said method comprising: a) generating a population comprising a plurality of polypeptides of the invention; b) contacting the population of variant antibodies with a target antigen under conditions suitable for binding; c) separating a binder polypeptide in the library from nonbinder polypeptides; d) identifying a target antigen-specific binder by determining whether the binder binds to a non-target antigen; and e) isolating a target antigen-specific binder polypeptide. In some embodiments, step (e) comprises eluting the binder polypeptide from the target antigen, and amplifying a replicable expression vector encoding said binder polypeptide. In some embodiments, one or more of the libraries, clones or variant antibodies are screened against a panel of antigens including the target antigen. In some embodiments, those clones or variant antibodies that specifically bind to the target antigen and do not substantially crossreact with any of the other antigen on the panel are selected. The panel of antigens can include at least three and up to 100 different antigens. In some cases, the panel of antigens includes 3 to 100, 3 to 50, 3 to 25, or 3 to 10 different antigens.

[0068] Combinations of any of the sorting/selection methods described above may be combined with the screening methods. For example, in one embodiment, polypeptide binders (e.g. variant antibodies) are first selected for binding to an immobilized target antigen. Polypeptide binders that bind to the immobilized target antigen can then be screened for binding to the target antigen and for lack of binding to nontarget antigens. Polypeptide binders that bind specifically to the target antigen can be amplified as necessary. These polypeptide binders can be selected for higher affinity by contact with a concentration of a labeled target antigen to form a complex, wherein the concentration range of labeled target antigen is from about 0.1 nM to about 1000 nM, and the complexes are isolated by contact with an agent that binds to the label on the target antigen. A polypeptide binder can then be eluted from the labeled target antigen and optionally, the rounds of selection are repeated, and each time a lower concentration of labeled target antigen is used. The binder polypeptides that can be isolated using this selection method can then be screened for high affinity using conventional methods known in the art. Populations of variant antibodies of the invention used in methods of the invention can be provided in any form suitable for the selection/screening steps. For example, the variant antibodies can be in free soluble form, attached to a matrix, or present at the surface of a viral particle such as phage or phagemid particle. In some embodiments of methods of the invention, the plurality of variant antibodies are encoded by a plurality of replicable vectors provided in the form of a library. In selection/screening methods described herein, vectors encoding a binder polypeptide may be further amplified to provide sufficient quantities of the variant antibodies for use in repetitions of the selection/screening steps (which, as indicated above, are optional in methods of the invention).

[0069] In one embodiment, the invention provides a method of selecting for a polypeptide that binds to a target antigen comprising: a) generating a composition comprising a plurality of polypeptides of the invention as described herein; b) selecting a polypeptide binder that binds to a target antigen from the composition; c) isolating the polypeptide binder from the nonbinders; d) identifying binders of the desired affinity from the isolated polypeptide binders.

[0070] In another embodiment, the invention provides a method of selecting for an antigen binding variable domain that binds to a target antigen from a library of antibody variable domains comprising: a) contacting the library of antibody variable domains of the invention (as described herein) with a target antigen; b) separating binders from nonbinders, and eluting the binders from the target antigen and incubating the binders in a solution with decreasing amounts of the target antigen in a concentration from about 0.1 nM to 1000 nM; c) selecting the binders that can bind to the lowest concentration of the target antigen and that have an affinity of about 0.1 nM to 200 nM.

[0071] In one embodiment, the invention provides a method of selecting for a polypeptide that binds to a target antigen from a library of polypeptides comprising: a) isolating polypeptide binders to a target antigen by contacting a library comprising a plurality of polypeptides of the invention (as described herein) with an immobilized target antigen under conditions suitable for binding; b) separating the polypeptide binders in the library from nonbinders and eluting the binders from the target antigen to obtain a subpopulation enriched for the binders; and c) optionally, repeating steps a-b at least once (in some embodiments at least twice), each repetition using the subpopulation of binders obtained from the previous round of selection.

[0072] In some embodiments, methods of the invention further comprise the steps of d) incubating the subpopulation of polypeptide binders with a concentration of labeled target antigen in the range of 0.1 nM to 1000 nM under conditions suitable for binding to form a mixture; e) contacting the mixture with an immobilized agent that binds to the label on the target antigen; f) detecting the polypeptide binders bound to labeled target antigens and eluting the polypeptide binders from the labeled target antigen; g) optionally, repeating steps d) to f) at least once (in some embodiments, at least twice), each repetition using the subpopulation of binders obtained from the previous round of selection and using a lower concentration of labeled target antigen than the previous round.

[0073] In some embodiments, these methods further comprise adding an excess of unlabelled target antigen to the mixture and incubating for a period of time sufficient to elute low affinity binders from the labeled target antigen. In one embodiment, a method of selecting for a polypeptide that binds to a target antigen is provided, comprising: (a) generating a composition with a plurality of one or more of the above-described polypeptides; (b) selecting one or more polypeptides from the composition that binds to a target antigen; (c) isolating the one or more polypeptides that bind to the target antigen from polypeptides that do not bind to the target antigen; and (d) identifying the one or more polypeptides that bind to the target antigen that have a desired affinity for the target antigen.

[0074] In one embodiment, a method of selecting for an antigen binding variable domain that binds to a target antigen from a library of antibody variable domains is provided, comprising: (a) contacting one or more of the herein described antibody libraries with a target antigen; (b) separating one or more antibodies that specifically bind to the target antigen from antibodies that do not specifically bind to the target antigen, recovering the one or more antibodies that specifically bind to the target antigen, and incubating the one or more antibodies that specifically bind to the target antigen in a series of solutions comprising decreasing amounts of the target antigen in a concentration from about 0.1 nM to about 1000 nM; and (c) selecting the one or more antibodies that specifically bind to the target antigen and that can bind to the lowest concentration of the target antigen or that have an affinity of about 0.1 nM to about 200 nM. In one aspect, the target antigen is as described herein. In one aspect, the concentration of the target antigen is about 100 to about 250 nM. In one aspect, the concentration of target antigen is about 25 to about 100 nM. In some embodiments, one or more of the libraries, clones or antibodies are screened against a panel of antigens including the target antigen. In some embodiments, those clones or antibodies that specifically bind to the target antigen and do not substantially crossreact with any of the other antigen on the panel are selected. The panel of antigens can include at least three and up to 100 different antigens. In some cases, the panel of antigens includes 3 to 100, 3 to 50, 3 to 25, or 3 to 10 different antigens.

[0075] In one embodiment, a method of selecting for a variant antibody that binds to a target antigen from a library of antibodies is provided, comprising: (a) isolating one or more antibodies that specifically bind to the target antigen by contacting a library comprising a plurality of any of the above-described antibodies with an immobilized target antigen under conditions suitable for binding; (b) separating the one or more antibodies that specifically bind to the target antigen from antibodies that do not specifically bind to the target antigen, and recovering the one or more antibodies that specifically bind to the target antigen to obtain a subpopulation enriched for the one or more antibodies that specifically bind to the target antigen; and (c) optionally, repeating steps (a)-(b) at least twice, each repetition using the subpopulation enriched for the one or more antibodies that specifically bind to the target antigen obtained from the previous round of selection. In one aspect, the method further comprises: (d) incubating the subpopulation with a concentration of labeled target antigen in the range of about 0.1 nM to about 1000 nM to form a mixture, under conditions suitable for binding; (e) contacting the mixture with an immobilized agent that binds to the label on the target antigen; (f) detecting the one or more antibodies that specifically bind to the labeled target antigen, and recovering the one or more antibodies that specifically bind to the labeled target antigen from the labeled target antigen; and (g) optionally, repeating steps (d) to (0 at least twice, each repetition using the subpopulation enriched for the one or more antibodies that specifically bind to the labeled target antigen obtained from the previous round of selection, and using a lower concentration of labeled target antigen than the previous round of selection.

[0076] In one aspect, the method further comprises adding an excess of unlabeled target antigen to the mixture and incubating the mixture for a period of time sufficient to recover one or more antibodies that specifically bind to the target antigen with low affinity. In some embodiments, in any of the methods described herein, one or more of the libraries, clones or antibodies are screened against a panel of antigens including the target antigen. In some embodiments, those clones or antibodies that specifically bind to the target antigen and do not substantially crossreact with any of the other antigen on the panel are selected. The panel of antigens can include at least three and up to 100 different antigens.

[0077] In one embodiment, a method of isolating one or more antibodies that specifically bind to a target antigen with high affinity is provided, comprising: (a) contacting a library comprising a plurality of any of a variant antibodies with a target antigen at a concentration of at least about 0.1 nM to about 1000 nM to isolate one or more antibodies that specifically bind to the target antigen; (b) recovering the one or more antibodies that specifically bind to the target antigen from the target antigen to obtain a subpopulation enriched for the one or more antibodies that specifically bind to the target antigen; and (c) optionally repeating steps (a) and (b) at least twice, each repetition using the subpopulation obtained from the previous round of selection and using a decreased concentration of target antigen from that used in the previous round to isolate one or more antibodies that bind specifically to the target antigen at the lowest concentration of target antigen.

[0078] In one embodiment, a method of screening a library comprising a plurality of any of the herein described antibodies is provided, comprising: (a) incubating a first sample of the library with a target antigen under conditions suitable for binding of the antibodies to the target antigen; (b) incubating a second sample of the library in the absence of a target antigen; (c) contacting each of the first sample and the second sample with immobilized target antigen under conditions suitable for binding of the antibodies to the immobilized target antigen; (d) detecting the antibodies bound to immobilized target antigen for each sample; and (e) determining the affinity of the antibodies for the target antigen by calculating the ratio of the amounts of bound antibodies from the first sample over the amount of bound antibodies from the second sample.

[0079] In some embodiments, a polypeptide of the invention comprises a light chain and a heavy chain antibody variable domain, wherein the light chain variable domain comprises at least 1 JR and may further comprise at least 1, 2 or 3 variant CDRs selected from the group consisting of CDR L1, L2 and L3, and the heavy chain variable domain comprises at least 1, 2 or 3 variant CDRs selected from the group consisting of CDR H1, H2 and H3.

[0080] In some embodiments, a polypeptide of the invention further comprises a light chain constant domain fused to a light chain variable domain, which in some embodiments comprises at least one, two or three variant CDRs. In some embodiments of antibodies of the invention, the antibody comprises a heavy chain constant domain fused to a heavy chain variable domain, which in some embodiments comprises at least one, two or three variant CDRs.

[0081] As described herein, a variant CDR refers to a CDR with a sequence variance as compared to the corresponding CDR of a single reference polypeptide/source antibody. Accordingly, the CDRs of a single antibody of the invention can in certain embodiments correspond to the set of CDRs of a single reference antibody or source antibody. Antibodies of the invention may comprise any one or combinations of variant CDRs. For example, a variant antibody of the invention may comprise a variant CDRH1 and variant CDRH2 and/or a variant JR. An antibody of the invention may comprise a variant CDRH1, variant CDRH2 and a variant CDRH3. In another example, a polypeptide of the invention may comprise a variant JR, a variant CDRH1, variant CDRH2, variant CDRH3 and variant CDRL3. In another example, a variant antibody of the invention comprises a variant JR, a variant CDRL1, variant CDRL2 and variant CDRL3. Any polypeptide of the invention may further comprise a variant CDRL3. Any antibody of the invention may further comprise a variant CDRH3 and/or a variant JR.

[0082] In one aspect, the invention provides a polynucleotide encoding a variant antibody of the invention as described herein. In another aspect, the invention provides a vector comprising a sequence encoding a variant antibody of the invention. The vector can be, for example, a replicable expression vector (for example, the replicable expression vector can be M13, fl, fd, Pf3 phage or a derivative thereof, or a lambdoid phage, such as lambda, 21, phi80, phi81, 82, 424, 434, etc., or a derivative thereof). The vector can comprise a promoter region linked to the sequence encoding a polypeptide of the invention. The promoter can be any suitable for expression of the variant antibody, for example, the lac Z promoter system, the alkaline phosphatase pho A promoter (Ap), the bacteriophage I.sub.PL promoter (a temperature sensitive promoter), the tac promoter, the tryptophan promoter, and the bacteriophage T7 promoter. Thus, the invention also provides a vector comprising a promoter selected from the group consisting of the foregoing promoter systems.

[0083] Polypeptides or variant antibodies of the invention can be displayed in any suitable form in accordance with the need and desire of the practitioner. For example, an antibody of the invention can be displayed on a viral surface, for example, a phage or phagemid viral particle. Accordingly, the invention provides viral particles comprising a variant antibody of the invention and/or polynucleotide encoding a variant antibody of the invention.

[0084] In one aspect, the invention provides a population comprising a plurality of a variant antibodies or polynucleotides of the invention, wherein each type of variant antibody or polynucleotide is a variant antibody or polynucleotide of the invention as described herein.

[0085] In some embodiments, variant antibodies and/or polynucleotides are provided as a library, for example, a library comprising a plurality of at least about 1.times.10.sup.4, 1.times.10.sup.5, 1.times.10.sup.6, 1.times.10.sup.7, 1.times.10.sup.8 distinct variant antibody and/or polynucleotide sequences of the invention. A library of the invention may comprise viruses or viral particles displaying any number of distinct variant antibody (sequences), for example, at least about 1.times.10.sup.4, 1.times.10.sup.5, 1.times.10.sup.6, 1.times.10.sup.7, 1.times.10.sup.8 distinct variant antibodies.

[0086] In another aspect, the invention provides host cells comprising a polynucleotide or vector comprising a sequence encoding a variant antibody of the invention.

[0087] Diagnostic and therapeutic uses for the variant antibodies of the invention are also contemplated. In one diagnostic application, the invention provides a method for determining the presence of a protein of interest comprising exposing a sample suspected of containing the protein to a variant antibody of the invention and determining binding of the variant antibody to the sample. For this use, the invention provides a kit comprising the variant antibodies and instructions for using the variant antibodies to detect the protein.

[0088] The invention further provides: isolated nucleic acid encoding the binder polypeptide; a vector comprising the nucleic acid, optionally, operably linked to control sequences recognized by a host cell transformed with the vector; a host cell transformed with the vector; a process for producing the binder polypeptide comprising culturing this host cell so that the nucleic acid is expressed and, optionally, recovering the binder polypeptide from the host cell culture (e.g. from the host cell culture medium).

[0089] The invention also provides a composition comprising a variant antibody of the invention and a carrier (e.g., a pharmaceutically acceptable carrier) or diluent. This composition for therapeutic use is sterile and may be lyophilized. Also contemplated is the use of a variant antibody of this invention in the manufacture of a medicament for treating an indication described herein. The composition can further comprise a second therapeutic agent such as a chemotherapeutic agent, a cytotoxic agent or an anti-angiogenic agent.

[0090] The invention further provides a method for treating a mammal, comprising administering an effective amount of a variant antibody of the invention to the mammal, The mammal to be treated in the method may be a nonhuman mammal, e.g. a primate suitable for gathering preclinical data or a rodent (e.g., mouse or rat or rabbit). The nonhuman mammal may be healthy (e.g. in toxicology studies) or may be suffering from a disorder to be treated with the binder polypeptide of interest.

[0091] In one embodiment, the mammal is suffering from or is at risk of developing abnormal angiogenesis (e.g., pathological angiogenesis). In one embodiment, the disorder is a cancer. The amount of the variant antibody of the invention that is administered will be a therapeutically effective amount to treat the disorder. In dose escalation studies, a variety of doses of the binder polypeptide may be administered to the mammal. In another embodiment, a therapeutically effective amount of the variant antibody is administered to a human patient to treat a disorder in that patient. In one embodiment, the variant antibody according to the invention are Fab or scFv antibodies.

[0092] For the sake of clarity, in the description herein, unless specifically or contextually indicated otherwise, all amino acid numberings are according to Kabat et al. (see further elaboration in “Definitions” below).

### BRIEF DESCRIPTION OF THE DRAWINGS

[0093] FIG. 1 shows the consistency of FR backbones among several hundred known crystal structures, and the diversity of structural folds for various CDR lengths.

[0094] FIG. 2 shows PDL1 library framework sequences of VH, VK, and Vlambda.

[0095] FIG. 3 shows the VH-CDR length distribution and CDR loop structure clusters.

[0096] FIG. 4 shows the PDL1 library design process.

[0097] FIG. 5 shows the amino acid sequences of VH-CDR1 libraries of PDL1 library.

[0098] FIG. 6 shows the amino acid sequences of VH-CDR2 libraries of PDL1 library.

[0099] FIGS. 7A, 7B, and 7C show the amino acid sequences of VH-CDR3 libraries of PDL1 library.

[0100] FIGS. 8A and 8B show the amino acid sequences of VK-CDR1 libraries of PDL1 library.

[0101] FIGS. 9A and 9B show the amino acid sequences of VK-CDR3 libraries of PDL1 library.

[0102] FIGS. 10A and 10B show the amino acid sequences of Vλ-CDR3 libraries of PDL1 library.

[0103] FIG. 11 shows examples to reduce the possibility of cyteines from 54% (before split) to 0% (post split), as well as the size of libraries.

[0104] FIG. 12 illustrates the adapter-directed phage display system.

[0105] FIG. 13 shows the vector map of helper phage GMCT.

[0106] FIG. 14 shows the vector map of pABMX492 for Fab display.

[0107] FIG. 15 shows the display vectors for PDL1 library with K and lambda light chains.

[0108] FIG. 16 illustrates the PDL1 library construction process. PDL1 library is a fully synthetic human antibody library. Construction of this synthetic library consist of the following four major consecutive steps: 1) syntheses of library degenerated oligos; 2) assembly of building blocks and chain libraries from the oligos; 3) ORF filtering of building blocks to remove open-reading frame shifts; 4) Fab library construction by cloning light chain and heavy chain into Fab display vectors.

[0109] FIG. 17 illustrates the oligo quality assessments. FIG. 17A shows the purity analysis of library oligos. FIG. 17B shows the library oligo fidelity.

[0110] FIGS. 18A and 18B show examples of assembly of library building blocks.

[0111] FIG. 19 shows the vector map of pMAS3 vector.

[0112] FIG. 20 shows the ELISA data that illustrates the binding of PDL1 Fabs to human PCSK9.

[0113] FIG. 21A shows the sequences of VH from a panel of anti-human PCSK9 antibodies isolated from PDL1 library panning.

[0114] FIG. 21B shows the sequences of VK from a panel of anti-human PCSK9 antibodies isolated from PDL1 library panning.

[0115] FIG. 22 shows the ELISA data that illustrated the binding of PDL1-Fabs to mouse PCSK9.

[0116] FIGS. 23A and 23B show the sequences of VH from a panel of anti-mouse PCSK9 antibodies isolated from PDL1 library panning.

[0117] FIGS. 23C and 23D show the sequences of VK from a panel of anti-mouse PCSK9 antibodies isolated from PDL1 library panning.

[0118] FIG. 24 shows the ELISA data that illustrated the binding of PDL1-Fabs to human Her3 protein.

[0119] FIGS. 25A and 25B show the sequences of VH from a panel of anti-human Her3 antibodies isolated from PDL1 library panning.

[0120] FIGS. 25C and 25D show the sequences of VK from a panel of anti-human Her3 antibodies isolated from PDL1 library panning.

[0121] FIG. 26 shows the ELISA data that illustrated the binding of PDL1-Fabs to mouse IL13R-Fc protein.

[0122] FIGS. 27A and 27B show the sequences of VH from a panel of anti-mouse IL13R-Fc antibodies isolated from PDL1 library panning.

[0123] FIGS. 27C and 27D show the sequences of VK from a panel of anti-mouse IL13R-Fc antibodies isolated from PDL1 library panning.

[0124] FIG. 28 shows the ELISA data that illustrated the binding of PDL1-Fabs to mouse EPHA2 protein.

[0125] FIG. 29A shows the sequences of VH from a panel of anti-mouse EPHA2 antibodies isolated from PDL1 library panning.

[0126] FIG. 29B shows the sequences of VK from a panel of anti-mouse EPHA2 antibodies isolated from PDL1 library panning.

[0127] FIG. 30 shows the ELISA data that illustrated the binding of PDL1-Fabs to HSV viral protein gE protein.

[0128] FIG. 31 shows the sequences of VH and Vk from a panel of anti-HSV viral protein gE antibodies isolated from PDL1 library panning.

[0129] FIG. 32 shows the ELISA data that illustrated the binding of PDL1-Fabs to TrkA protein.

[0130] FIG. 33 shows the sequences of VH, Vk, and Vλ from a panel of anti-TrkA antibodies isolated from PDL1 library panning.

[0131] FIG. 34 illustrates the impact of PDL1 Fabs on PCSK9-LDL receptor interaction. This Biacore-based assay shows that binding of AX1, AX9, and AX114 to PCSK9 inhibits the interaction of PCSK9-LDLR and PCSK9-EGF_AB domain. EGF_AB domain in LDLR involves the interaction with PCSK9.

[0132] FIG. 35 shows the distribution of Fab affinities against human PCSK9.

[0133] FIG. 36 illustrates a library designed for AX114 antibody engineering. MABL83 library is a light chain library with amino acid diversity in VK-CDR1, CDR2 and CDR3 regions. The amino acid substitutions at each position are provided.

[0134] FIG. 37 illustrates the library designed for AX114 antibody engineering. MABL85 library is a heavy chain library with amino acid diversity in VH-CDR1, CDR2 and CDR3 regions. The amino acid substitutions at each position are provided.

[0135] FIG. 38 illustrates the library designed for AX114 antibody engineering. MABL87 library is a heavy chain library with amino acid diversity in CDR3 regions. The amino acid substitutions at each position are provided.

[0136] FIG. 39 illustrates the library designed for AX114 antibody engineering. MABL88 library is a heavy chain and light library with amino acid diversity in VH-CDR1, 2 and Vk-CDR1, 2, 3 regions. The amino acid substitutions at each position are provided.

[0137] FIG. 40 illustrates the library designed for AX114 antibody engineering. MABL89 library is a heavy chain library with amino acid diversity in VH-CDR1, 2 regions. The amino acid substitutions at each position are provided.

[0138] FIG. 41 illustrates the library designed for AX114 antibody engineering. MABL90 library is a light chain library with amino acid diversity in Vk-CDR1, 2 regions. The amino acid substitutions at each position are provided.

[0139] FIG. 42 illustrates the library designed for AX114 antibody engineering. MABL92 library is a heavy and light chain library with amino acid diversity in VH-CDR3 and Vk-CDR3 regions. The amino acid substitutions at each position are provided.

[0140] FIG. 43 illustrates the allowed amino acid substitutions in VK-CDR1, 2, 3 regions from 134 AX114 variants, which are isolated from 10 optimization libraries listed in Table 19. For each variable position, the allowed amino acids are provided.

[0141] FIG. 44 illustrates the allowed amino acid substitutions in VH-CDR1, 2, 3 regions from 134 AX114 variants, which are isolated from 10 optimization libraries listed in Table 19. For each variable position, the allowed amino acids are provided.

[0142] FIG. 45 illustrates the process of affinity measurement for yeast hits in E. coli system.

### DETAILED DESCRIPTION OF THE INVENTION

[0143] The invention provides novel, unconventional, greatly simplified and flexible methods for diversifying CDR sequences (including antibody variable domain sequences), and libraries comprising a multiplicity, generally a great multiplicity of diversified CDRs (including antibody variable domain sequences). Such libraries provide combinatorial libraries useful for, for example, selecting and/or screening for synthetic antibody clones with desirable activities such as binding affinities and avidities. These libraries are useful for identifying immunoglobulin polypeptide sequences that are capable of interacting with any of a wide variety of target antigens. For example, libraries comprising diversified immunoglobulin polypeptides of the invention expressed as phage displays are particularly useful for, and provide a high throughput, efficient and automatable systems of, selecting and/or screening for antigen binding molecules of interest. The methods of the invention are designed to provide high affinity binders to target antigens with minimal changes to a source or template molecule and provide for good production yields when the antibody or antigens binding fragments are produced in cell culture.

[0144] Methods and compositions of the invention provide numerous additional advantages. For example, relatively simple variant CDR sequences can be generated, using codon sets encoding a restricted number of amino acids (as opposed to the conventional approach of using codon sets encoding the maximal number of amino acids), while retaining sufficient diversity of unique target binding sequences. The simplified nature (and generally relatively smaller size) of sequence populations generated according to the invention permits further diversification once a population, or sub-population thereof, has been identified to possess the desired characteristics.

[0145] The simplified nature of sequences of target antigen binders obtained by methods of the invention leaves significantly greater room for individualized further sequence modifications to achieve the desired results. For example, such sequence modifications are routinely performed in affinity maturation, humanization, etc. By basing diversification on restricted codon sets that encode only a limited number of amino acids, it would be possible to target different epitopes using different restricted codon sets, thus providing the practitioner greater control of the diversification approach as compared with randomization based on a maximal number of amino acids. An added advantage of using restricted codon sets is that undesirable amino acids can be eliminated from the process, for example, methionine or stop codons, thus improving the overall quality and productivity of a library. Furthermore, in some instances, it may be desirable to limit the conformational diversity of potential binders. Methods and compositions of the invention provide the flexibility for achieving this objective. For example, the presence of certain amino acids, such as tyrosine, in a sequence results in fewer rotational conformations.

### DEFINITIONS

[0146] Amino acids are represented herein as either a single letter code or as the three letter code or both.

[0147] The term “affinity purification” means the purification of a molecule based on a specific attraction or binding of the molecule to a chemical or binding partner to form a combination or complex which allows the molecule to be separated from impurities while remaining bound or attracted to the partner moiety.

[0148] The term “antibody” is used in the broadest sense and specifically covers single monoclonal antibodies (including agonist and antagonist antibodies), antibody compositions with polyepitopic specificity, affinity matured antibodies, humanized antibodies, chimeric antibodies, as well as antigen binding fragments (e.g., Fab, F(ab′).sub.2, scFv and Fv), so long as they exhibit the desired biological activity. In one embodiment, the term “antibody” also includes human, chimeric and humanized antibodies.

[0149] A “variable region” has the structure of an antibody variable region from a heavy or light chain. Antibody heavy and light chain variable regions contain three complementarity determining regions (“CDRs”) interspaced onto a framework (“FW”). The CDRs are primarily responsible for recognizing a particular epitope. It is well known that epitopes usually consist of chemically active surface groupings of molecules such as amino acids or sugar side chains and usually have specific three dimensional structural characteristics, as well as specific charge characteristics. Conformational and nonconformational epitopes are distinguished in that the binding to the former but not the latter is lost in the presence of denaturing solvents.

[0150] The hypervariable regions are generally referred to as complementarity determining regions (“CDR”) and are interposed between more conserved flanking regions referred to as framework regions (“FW”). There are four (4) FW regions and three (3) CDRs that are arranged from the NH2 terminus to the COOH terminus as follows: FW1, CDR1, FW2, CDR2, FW3, CDR3, FW4. Amino acids associated with framework regions and CDRs can be numbered and aligned by approaches described by Kabat et al., Sequences of Proteins of Immunological Interest, U.S. Department of Health and Human Services, 1991; C. Chothia and A. M. Lesk, Canonical structures for the hypervariable regions of immunoglobulins, Journal of Molecular Biology 196(4):901 (1987); or B. Al-Lazikani, A. M. Lesk and C. Chothia, Standard conformations for the canonical structures of immunoglobulins <http://dx.doi.org/10.1006/jmbi.1997.1354>, Journal of Molecular Biology 273(4): 27, 1997. For example, the framework regions and CDRs can be identified from consideration of both the Kabat and Chothia definitions.

[0151] CDRs are primarily responsible for binding to a particular epitope. Within a particular CDR, there are a few specificity determining residues (SDRs) which are of greater importance for binding to an epitope (see Kashmiri et al., Methods 36:25-34, 2005; Presta, Advanced Drug Delivery Reviews 58:640-656, 2006). SDRs can be identified, for example, through the help of target protein-antibody three-dimensional structures and mutational analysis of antibody combining sites. (Kashmiri et al., 2005, supra.) Thus, the PD-1 binding proteins of the present invention do not always require both a variable heavy chain and light chain domain to render PD-1 specificity but may only need a single CDR loop or a fragment of a functional antibody (see, e.g., Xu and Davis, 2000, Immunity 13:37-45 and Levi et al., 1993, Proc. Natl. Acad. Sci. USA 90:4374-78 (for CDR3 specificity); Williams et al., 1989, Proc. Natl. Acad. Sci. USA 86:5537-41 (CDR2 specificity); and, Welling et al., 1991, 3. Chromatography 548:235-42 (10 amino acid miniantibody).

[0152] For the purposes of this application, the term “CDR” is expanded to includes not only the standard definition of a CDR but also includes the three contiguous amino acid residues from the Fr region that flank each CDR. Thus CDR as defined in the application can be defined schematically as +3CDR+3 wherein each +3 refers to the 3FR amino acids flanking each CDR on each side. Alternatively, a CDR may include one or both JR's appended on each end—the N and/or C-terminal end of the CDR. Thus, in some embodiments, the heavy chain comprises 3 CDRs, each CDR comprising a JR_{N} and a JR_{C}. The same holds true for a light chain. It is understood that when introducing a mutation via a addition, substitution, addition, mutation etc into one or more JR's, one need not necessarily also mutate the other JR or the CDR shared by the respective JR's. In other words, if a framework residue in a JR was diversified via an amino acid substitution into the N-terminal JR relative to the CDRH1, the methods of the invention do not propose necessarily diversifying either CDRH1 and/or JF at the C terminal of CDRH1. Thus a JR_{N} of CDHR1 may be diversified and combined with a CDR diversification of say CDRH2 etc in which the JR's remain untouched.

[0153] In general, the term “Complementarity Determining Regions (CDRs; i.e., CDR1, CDR2, and CDR3) refers to the amino acid residues of an antibody variable domain the presence of which are necessary for antigen binding. Each variable domain typically has three CDR regions identified as CDR1, CDR2 and CDR3. Each complementarity determining region may comprise amino acid residues from a “complementarity determining region” as defined by Kabat (i.e. about residues 24-34 (L1), 50-56 (L2) and 89-97 (L3) in the light chain variable domain and 31-35 (H1), 50-65 (H2) and 95-102 (113) in the heavy chain variable domain; Kabat et al., Sequences of Proteins of Immunological Interest, 5th Ed. Public Health Service, National Institutes of Health, Bethesda, Md. (1991)) and/or those residues from a “hypervariable loop” (i.e. about residues 26-32 (L1), 50-52 (L2) and 91-96 (L3) in the light chain variable domain and 26-32 (H1), 53-55 (H2) and 96-101 (H3) in the heavy chain variable domain; Chothia and Lesk J. Mol. Biol. 196:901-917 (1987)). In some instances, a complementarity determining region can include amino acids from both a CDR region defined according to Kabat and a hypervariable loop.

[0154] “Junctional region” “variable framework region” “JR” “VFR” as used herein refers to the contiguous set of three framework residues adjoining a CDR region on at least one side (N or C terminal end of the CDR) or preferably on each side each of a CDR region. More, it refers to the region spanning 3 contiguous framework residues in contact with the CDR on the C- or N-terminal end of the CDR. The three-dimensional structure may be analyzed for solvent accessible amino acid positions as such positions are likely to form a loop and/or provide antigen contact in an antibody variable domain. Some of the solvent accessible positions can tolerate amino acid sequence diversity and others (eg structural positions) will be less diversified. The three dimensional structure of the antibody variable domain may be derived from a crystal structure or protein modeling. In some embodiments, the VFR comprises, consist essentially of, or consists of amino acid positions corresponding to amino acid positions 21-23 and/or 35-37 relative to CDRL1 (24-34) of the light chain variable domain, the positions defined according to Kabat et al., 1991. Likewise, CDRL2 comprises 50-56 and thus the VFR comprises 47-49 and/or 57-59 (L2); CDR L3 comprises positions 89-97 (L3) in the light chain variable and thus the corresponding VFR for L3 includes residues at positions 86-88 and/or 98-100. The same rules are applicable to the CDR's on the heavy chain−([3+-28-30] 31-35 (H1)), 3+50-65 3+(H2) and 3+95-102 3+(H3).

[0155] “Antibody fragments” comprise only a portion of an intact antibody, generally including an antigen binding site of the intact antibody and thus retaining the ability to bind antigen. Non-limiting examples of antibody fragments encompassed by the present definition include: (1) the Fab fragment, having VL, CL, VH and CH1 domains having one interchain disulfide bond between the heavy and light chain; (ii) the Fab′ fragment, which is a Fab fragment having one or more cysteine residues at the C-terminus of the CH1 domain; (iii) the Fd fragment having VH and CH1 domains; (iv) the Fd′ fragment having VH and CH1 domains and one or more cysteine residues at the C-terminus of the CH1 domain; (v) the Fv fragment having the VL and VH domains of a single arm of an antibody; (vi) the dAb fragment which consists of a VH domain; (vii) hingeless antibodies including at least VL, VH, CL, CH1 domains and lacking hinge region; (viii) F(ab′).sub.2 fragments, a bivalent fragment including two Fab′ fragments linked by a disulfide bridge at the hinge region; (ix) single chain antibody molecules (e.g. single chain Fv; scFv); (x) “diabodies” with two antigen binding sites, comprising a heavy chain variable domain (VH) connected to a light chain variable domain (VL) in the same polypeptide chain; (xi) single arm antigen binding molecules comprising a light chain, a heavy chain and a N-terminally truncated heavy chain constant region sufficient to form a Fc region capable of increasing the half life of the single arm antigen binding domain; (xii) “linear antibodies” comprising a pair of tandem Fd segments (VH-CH1-VH-CH1) which, together with complementary light chain polypeptides, form a pair of antigen binding regions.

[0156] “Framework regions” (hereinafter “FR”) are those variable domain residues other than the CDR residues. Each variable domain typically has four FRs identified as FR1, FR2, FR3 and FR4. If the CDRs are defined according to Kabat, the light chain FR residues are positioned at about residues 1-23 (LCFR1), 3549 (LCFR2), 57-88 (LCFR3), and 98-107 (LCFR4) and the heavy chain FR residues are positioned about at residues 1-30 (HCFR1), 36-49 (HCFR2), 66-94 (HCFR3), and 103-113 (HCFR4) in the heavy chain residues. If the CDRs comprise amino acid residues from hypervariable loops, the light chain FR residues are positioned about at residues 1-25 (LCFR1), 33-49 (LCFR2), 53-90 (LCFR3), and 97-107 (LCFR4) in the light chain and the heavy chain FR residues are positioned about at residues 1-25 (HCFR1), 33-52 (HCFR2), 56-95 (HCFR3), and 102-113 (HCFR4) in the heavy chain residues. In some instances, when the CDR comprises amino acids from both a CDR as defined by Kabat and those of a hypervariable loop, the FR residues can be adjusted accordingly. For example, when CDRH1 includes amino acids H26-H35, the heavy chain FR1 residues are at positions 1-25 and the FR2 residues are at positions 36-49

[0157] As used herein, “codon set” refers to a set of different nucleotide triplet sequences used to encode desired variant amino acids. A set of oligonucleotides can be synthesized, for example, by solid phase synthesis, including sequences that represent all possible combinations of nucleotide triplets provided by the codon set and that will encode the desired group of amino acids. A standard form of codon designation is that of the IUB code, which is known in the art and described herein. A codon set typically is represented by 3 capital letters in italics, e.g. NNK, NNS, XYZ, DVK and the like. Synthesis of oligonucleotides with selected nucleotide “degeneracy” at certain positions is well known in that art, for example the TRIM approach (Knappek et al.; J. Mol. Biol. (1999), 296:57-86); Garrard & Henner, Gene (1993), 128:103). Such sets of oligonucleotides having certain codon sets can be synthesized using commercial nucleic acid synthesizers (available from, for example, Applied Biosystems, Foster City, Calif.), or can be obtained commercially (for example, from Life Technologies, Rockville, Md.). Therefore, a set of oligonucleotides synthesized having a particular codon set will typically include a plurality of oligonucleotides with different sequences, the differences established by the codon set within the overall sequence. Oligonucleotides, as used according to the invention, have sequences that allow for hybridization to a variable domain nucleic acid template and also can, but does not necessarily, include restriction enzyme sites useful for, for example, cloning purposes.

[0158] The term “restricted codon set”, and variations thereof, as used herein refers to a codon set that encodes a much more limited number of amino acids than the codon sets typically utilized in art methods of generating sequence diversity. In one aspect of the invention, restricted codon sets used for sequence diversification encode from 2 to 10, from 2 to 8, from 2 to 6, from 2 to 4, or only 2 amino acids. In some embodiments, a restricted codon set used for sequence diversification encodes at least 2 but 10 or fewer, 8 or fewer, 6 or fewer, 4 or fewer amino acids. Determination of suitable restricted codons, and the identification of specific amino acids encoded by a particular restricted codon, is well known and would be evident to one skilled in the art, Determination of suitable amino acid sets to be used for diversification of a CDR sequence can be empirical and/or guided by criteria known in the art (e.g., inclusion of a combination of hydrophobic and hydrophilic amino acid types, etc.)

[0159] An “Fv” fragment is an antibody fragment which contains a complete antigen recognition and binding site. This region consists of a dimer of one heavy and one light chain variable domain in tight association, which can be covalent in nature, for example in scFv. It is in this configuration that the three CDRs of each variable domain interact to define an antigen binding site on the surface of the V.sub.H-V.sub.L dimer. Collectively, the six CDRs or a subset thereof confer antigen binding specificity to the antibody. However, even a single variable domain (or half of an Fv comprising only three CDRs specific for an antigen) has the ability to recognize and bind antigen, although usually at a lower affinity than the entire binding site.

[0160] The “Fab” fragment contains a variable and constant domain of the light chain and a variable domain and the first constant domain (CH1) of the heavy chain. F(ab′).sub.2 antibody fragments comprise a pair of Fab fragments which are generally covalently linked near their carboxy termini by hinge cysteines between them. Other chemical couplings of antibody fragments are also known in the art.

[0161] “Single-chain Fv” or “scFv” antibody fragments comprise the V.sub.H and V.sub.L domains of antibody, wherein these domains are present in a single polypeptide chain. Generally the Fv polypeptide further comprises a polypeptide linker between the V.sub.H and V.sub.L domains, which enables the scFv to form the desired structure for antigen binding. For a review of scFv, see Pluckthun in The Pharmacology of Monoclonal Antibodies, Vol 113, Rosenburg and Moore eds. Springer-Verlag, New York, pp. 269-315 (1994).

[0162] The term “diabodies” refers to small antibody fragments with two antigen-binding sites, which fragments comprise a heavy chain variable domain (V.sub.H) connected to a light chain variable domain (V.sub.L) in the same polypeptide chain (V.sub.H and V.sub.L). By using a linker that is too short to allow pairing between the two domains on the same chain, the domains are forced to pair with the complementary domains of another chain and create two antigen-binding sites. Diabodies are described more fully in, for example, EP 404,097; WO 93/11161; and Hollinger et al., Proc. Natl. Acad. Sci. USA, 90:6444-6448 (1993).

[0163] The expression “linear antibodies” refers to the antibodies described in Zapata et al., Protein Eng., 8(10):1057-1062 (1995). Briefly, these antibodies comprise a pair of tandem Fd segments (V.sub.H-C.sub.H1-V.sub.H-C.sub.H1) which, together with complementary light chain polypeptides, form a pair of antigen binding regions. Linear antibodies can be bispecific or monospecific.

[0164] The term “monoclonal antibody” as used herein refers to an antibody obtained from a population of substantially homogeneous antibodies, i.e., the individual antibodies comprising the population are identical except for possible naturally occurring mutations that may be present in minor amounts. Monoclonal antibodies are highly specific, being directed against a single antigenic site. Furthermore, in contrast to conventional (polyclonal) antibody preparations which typically include different antibodies directed against different determinants (epitopes), each monoclonal antibody is directed against a single determinant on the antigen. The modifier “monoclonal” indicates the character of the antibody as being obtained from a substantially homogeneous population of antibodies, and is not to be construed as requiring production of the antibody by any particular method. For example, the monoclonal antibodies to be used in accordance with the present invention may be made by the hybridoma method first described by Kohler et al., Nature 256:495 (1975), or may be made by recombinant DNA methods (see, e.g., U.S. Pat. No. 4,816,567). The “monoclonal antibodies” may also be isolated from phage antibody libraries using the techniques described in Clackson et al., Nature 352:624-628 (1991) and Marks et al., J. Mol. Biol. 222:581-597 (1991), for example.

[0165] The term “monoclonal antibody” as used herein refers to an antibody obtained from a population of substantially homogeneous antibodies, i.e., the individual antibodies comprising the population are essentially identical except for variants that may arise during production of the antibody. The monoclonal antibodies herein specifically include “chimeric” antibodies in which a portion of the heavy and/or light chain is identical with or homologous to corresponding sequences in antibodies derived from a particular species or belonging to a particular antibody class or subclass, while the remainder of the chain(s) is identical with or homologous to corresponding sequences in antibodies derived from another species or belonging to another antibody class or subclass, as well as fragments of such antibodies, so long as they exhibit the desired biological activity (U.S. Pat. No. 4,816,567; and Morrison et al., Proc. Natl. Acad. Sci. USA 81:6851-6855 (1984)).

[0166] A “human antibody” is one which possesses an amino acid sequence which corresponds to that of an antibody produced by a human and/or has been made using any of the techniques for making human antibodies as disclosed herein. This definition of a human antibody specifically excludes a humanized antibody comprising non-human antigen binding residues.

[0167] The term “monobody” as used herein, refers to an antigen binding molecule with a heavy chain variable domain and no light chain variable domain. A monobody can bind to an antigen in the absence of light chains and typically has three CDR regions designated CDRH1, CDRH2 and CDRH3. A heavy chain IgG monobody has two heavy chain antigen binding molecules connected by a disulfide bond. The heavy chain variable domain comprises one or more CDR regions, preferably a CDRH3 region. A “VhH” or “VHH” refers to a variable domain of a heavy chain antibody such as a monobody.

[0168] “Humanized” forms of non-human (e.g., murine) antibodies are chimeric antibodies which contain minimal sequence derived from non-human immunoglobulin. For the most part, humanized antibodies are human immunoglobulins (recipient antibody) in which residues from a hypervariable region of the recipient are replaced by residues from a hypervariable region of a non-human species (donor antibody) such as mouse, rat, rabbit or nonhuman primate having the desired specificity, affinity, and capacity. In some instances, Fv framework region (FR) residues of the human immunoglobulin are replaced by corresponding non-human residues. Furthermore, humanized antibodies may comprise residues which are not found in the recipient antibody or in the donor antibody. These modifications are made to further refine antibody performance. In general, the humanized antibody will comprise substantially all of at least one, and typically two, variable domains, in which all or substantially all of the hypervariable loops correspond to those of a non-human immunoglobulin and all or substantially all of the FR regions are those of a human immunoglobulin sequence. The humanized antibody optionally also will comprise at least a portion of an immunoglobulin constant region (Fc), typically that of a human immunoglobulin. For further details, see Jones et al., Nature 321:522-525 (1986); Riechmann et al., Nature 332:323-329 (1988); and Presta, Curr. Op. Struct. Biol. 2:593-596 (1992).

[0169] A “species-dependent antibody” is one which has a stronger binding affinity for an antigen from a first mammalian species than it has for a homologue of that antigen from a second mammalian species. Normally, the species-dependent antibody “binds specifically” to a human antigen (i.e. has a binding affinity (K.sub.d) value of no more than about 1.times.10.sup.-9 M, for example no more than about 1.times.10.sup.-8 M and as a further example no more than about 1.times.10.sup.-9 M) but has a binding affinity for a homologue of the antigen from a second nonhuman mammalian species which is at least about 50 fold, or at least about 500 fold, or at least about 1000 fold, weaker than its binding affinity for the human antigen. The species-dependent antibody can be any of the various types of antibodies as defined above, but preferably is a humanized or human antibody.

[0170] As used herein, “antibody mutant” or “antibody variant” refers to an amino acid sequence variant of the species-dependent antibody wherein one or more of the amino acid residues of the species-dependent antibody have been modified. Such mutants necessarily have less than 100% sequence identity or similarity with the species-dependent antibody. In one embodiment, the antibody mutant will have an amino acid sequence having at least 75% amino acid sequence identity or similarity with the amino acid sequence of either the heavy or light chain variable domain of the species-dependent antibody, for example at least 80%, for example at least 85%, for example at least 90%, and for example at least 95%. Identity or similarity with respect to this sequence is defined herein as the percentage of amino acid residues in the candidate sequence that are identical (i.e. same residue) or similar (i.e. amino acid residue from the same group based on common side-chain properties, see below) with the species-dependent antibody residues, after aligning the sequences and introducing gaps, if necessary, to achieve the maximum percent sequence identity. None of N-terminal, C-terminal, or internal extensions, deletions, or insertions into the antibody sequence outside of the variable domain shall be construed as affecting sequence identity or similarity. Biologically active fragments, deletional, insertional, or substitutional variants of the any one of more of the variant antibodies described herein or produced by the methods of the invention are also included.

[0171] An “isolated” antibody is one which has been identified and separated and/or recovered from a component of its natural environment. Contaminant components of its natural environment are materials which would interfere with diagnostic or therapeutic uses for the antibody, and may include enzymes, hormones, and other proteinaceous or nonproteinaceous solutes. In certain embodiments, the antibody will be purified (1) to greater than 95% by weight of antibody as determined by the Lowry method, e.g., to more than 99% by weight, (2) to a degree sufficient to obtain at least 15 residues of N-terminal or internal amino acid sequence by use of a spinning cup sequenator, or (3) to homogeneity by SDS-PAGE under reducing or nonreducing conditions using Coomassie blue or, preferably, silver stain. Isolated antibody includes the antibody in situ within recombinant cells since at least one component of the antibody's natural environment will not be present. Ordinarily, however, isolated antibody will be prepared by at least one purification step.

[0172] The term “antagonist” is used in the broadest sense, and includes any molecule that partially or fully blocks, inhibits, or neutralizes one or more biological activities of target molecules described herein (e.g. murine Her3, PCSK9 etc.) in vitro, in situ, or in vivo. For instance, the antagonist may function to partially or fully block, inhibit or neutralize one or more biological activities of a ligand of target molecule, in vitro, in situ, or in vivo as a result of its direct binding to the target molecule. The antagonist may also function indirectly to partially or fully block, inhibit or neutralize one or more biological activities of target molecule, in vitro, in situ, or in vivo as a result of, e.g., blocking or inhibiting another effector molecule. The antagonist molecule may comprise a “dual” antagonist activity wherein the molecule is capable of partially or fully blocking, inhibiting or neutralizing a biological activity of target molecule.

[0173] The term “agonist” is used in the broadest sense, and includes any molecule that partially or fully enhances, stimulates or activates one or more biological activities of target molecule described herein (e.g. Her3, PCSK9 etc), in vitro, in situ, or in vivo. An agonist may function in a direct or indirect manner. For instance, the agonist may function to partially or fully enhance, stimulate or activate one or more biological activities of the target molecule, in vitro, in situ, or in vivo as a result of its direct binding to the target molecule, which causes receptor activation or signal transduction. The agonist may also function indirectly to partially or fully enhance, stimulate or activate one or more biological activities of the target molecule, in vitro, in situ, or in vivo as a result of, e.g., stimulating another effector molecule which then causes target molecule activation or signal transduction. It is contemplated that an agonist may act as an enhancer molecule which functions indirectly to enhance or increase target molecule activation or activity.

[0174] “Cell”, “cell line”, and “cell culture” are used interchangeably herein and such designations include all progeny of a cell or cell line. Thus, for example, terms like “transformants” and “transformed cells” include the primary subject cell and cultures derived therefrom without regard for the number of transfers. It is also understood that all progeny may not be precisely identical in DNA content, due to deliberate or inadvertent mutations. Mutant progeny that have the same function or biological activity as screened for in the originally transformed cell are included. Where distinct designations are intended, it will be clear from the context.

[0175] “Heterologous DNA” is any DNA that is introduced into a host cell. The DNA may be derived from a variety of sources including genomic DNA, cDNA, synthetic DNA and fusions or combinations of these. The DNA may include DNA from the same cell or cell type as the host or recipient cell or DNA from a different cell type, for example, from a mammal or plant. The DNA may, optionally, include marker or selection genes, for example, antibiotic resistance genes, temperature resistance genes, etc.

[0176] As used herein, “library” refers to a plurality of antibody, antibody fragment sequences, or antibody variable domains (for example, polypeptides of the invention), or the nucleic acids that encode these sequences, the sequences being different in the combination of variant amino acids that are introduced into these sequences according to the methods of the invention.

[0177] “Oligonucleotides” are short-length, single- or double-stranded polydeoxynucleotide that are prepared by known methods such as chemical synthesis (e.g. phosphotriester, phosphite, or phosphoramidite chemistry, using solid-phase techniques such as described in EP 266,032 published 4 May 1988, or via deoxynucleoside H-phosphonate intermediates as described by Froeshler et al., Nucl. Acids, Res., 14:5399-5407 (1986)). Further methods include the polymerase chain reaction defined below and other autoprimer methods and oligonucleotide syntheses on solid supports. All of these methods are described in Engels et al., Agnew. Chem. Int. Ed. Engl., 28:716-734 (1989). These methods are used if the entire nucleic acid sequence of the gene is known, or the sequence of the nucleic acid complementary to the coding strand is available. Alternatively, if the target amino acid sequence is known, one may infer potential nucleic acid sequences using known and preferred coding residues for each amino acid residue. The oligonucleotides can be purified on polyacrylamide gels or molecular sizing columns or by precipitation.

[0178] DNA is “purified” when the DNA is separated from non-nucleic acid impurities. The impurities may be polar, non-polar, ionic, etc.

[0179] A “source antibody”, as used herein, refers to an antibody or antigen binding polypeptide whose antigen binding determinant sequence serves as the template sequence upon which diversification according to the criteria described herein is performed. An antigen binding determinant sequence generally includes an antibody variable region, preferably at least one CDR, and preferably including at least one framework regions. A source antibody variable domain can include an antibody, antibody variable domain, antigen binding fragment or polypeptide thereof, a monobody, VHH, a monobody or antibody variable domain obtained from a nave or synthetic library, naturally occurring antibody or monobody, synthetic antibody or monobody, recombinant antibody or monobody, humanized antibody or monobody, germline derived antibody or monobody, chimeric antibody or monobody, and affinity matured antibody or monobody.

[0180] As used herein, “solvent accessible position” refers to a position of an amino acid residue in the variable region of a heavy and/or light chain of a source antibody or antigen binding polypeptide that is determined, based on structure, ensemble of structures and/or modeled structure of the antibody or antigen binding polypeptide, as potentially available for solvent access and/or contact with a molecule, such as an antibody-specific antigen. These positions are typically found in the CDRs, but can also be found in FR and on the exterior of the protein. The solvent accessible positions of an antibody or antigen binding polypeptide, as defined herein, can be determined using any of a number of algorithms known in the art. Preferably, solvent accessible positions are determined using coordinates from a 3-dimensional model of an antibody or antigen binding polypeptide, preferably using a computer program such as the InsightII program (Accelrys, San Diego, Calif.). Solvent accessible positions can also be determined using algorithms known in the art (e.g., Lee and Richards, J. Mol. Biol. 55, 379 (1971) and Connolly, J. Appl. Cryst. 16, 548 (1983)). Determination of solvent accessible positions can be performed using software suitable for protein modeling and 3-dimensional structural information obtained from an antibody. Software that can be utilized for these purposes includes SYBYL Biopolymer Module software (Tripos Associates). Generally and preferably, where an algorithm (program) requires a user input size parameter, the “size” of a probe which is used in the calculation is set at about 1.4 Angstrom or smaller in radius. In addition, determination of solvent accessible regions and area methods using software for personal computers has been described by Pacios ((1994) “ARVOMOL/CONTOUR: molecular surface areas and volumes on Personal Computers.” Comput. Chem. 18(4): 377-386; and (1995). “Variations of Surface Areas and Volumes in Distinct Molecular Surfaces of Biomolecules.” J. Mol. Model. 1: 46-53.)

[0181] The phrase “structural amino acid position” as used herein refers to an amino acid of a polypeptide that contributes to the stability of the structure of the polypeptide such that the polypeptide retains at least one biological function such as specifically binding to a molecule such as an antigen and/or binds to a target molecule that binds to folded polypeptide and does not bind to unfolded polypeptide such as Protein A. Structural amino acid positions are identified as amino acid positions less tolerant to amino acid substitutions without affecting the structural stability of the polypeptide. Amino acid positions less tolerant to amino acid substitutions can be identified using a method such as alanine scanning mutagenesis or shotgun scanning as described in WO 01/44463 and analyzing the effect of loss of the wild type amino acid on structural stability. If a wild type amino acid is replaced with a scanning amino acid in a position, and the resulting variant exhibits poor binding to a target molecule that binds to folded polypeptide, then that position is important to maintaining the structure of the polypeptide. A structural amino acid position is a position in which, preferably, the ratio of polypeptides with wild type amino acid at a position to a variant substituted with a scanning amino acid at that position is at least about 3 to 1, about 5 to 1, about 5 to 1, about 10 to 1 or greater. In a further embodiment, structural amino acid positions are positions that have a weighted hydrophobicity value of greater than −0.5 as determined using the method of Kyte and Doolittle (cited supra) when the population is randomized in the VFR or CDRs. For example, in one embodiment the boundaries of CDR1 in the heavy chain are selected at amino acids 24 and 34 as these positions show a strong preference for hydrophobes.

[0182] The term “stability” as used herein refers to the ability of a molecule to maintain a folded state under physiological conditions such that it retains at least one of its normal functional activities, for example, binding to an antigen or to a molecule like Protein A. The stability of the molecule can be determined using standard methods. For example, the stability of a molecule can be determined by measuring the thermal melt (“TM”) temperature. The TM is the temperature in degrees Celsius at which ½ of the molecules become unfolded. Typically, the higher the TM, the more stable the molecule.

[0183] The phrase “randomly generated population” as used herein refers to a population of polypeptides wherein one or more amino acid positions in a domain has a variant amino acid encoded by a random codon set which allows for substitution of all 20 naturally occurring amino acids at that position. For example, in one embodiment, a randomly generated population of polypeptides having randomized VFR or portions thereof include a variant amino acid at each position in VFR that is encoded by a random codon set.

[0184] A “functional epitope” according to this invention refers to amino acid residues of an antigen that contribute energetically to the binding of an antibody. Mutation of any one of the energetically contributing residues of the antigen (for example, mutation of wild-type VEGF by alanine or homolog mutation) will disrupt the binding of the antibody such that the relative affinity ratio (IC₅₀mutant VEGFIC50wild-type VEGF) of the antibody will be greater than 5 (see Example 2). In a preferred embodiment, the relative affinity ratio is determined by a solution binding phage displaying ELISA. Briefly, 96-well Maxisorp immunoplates (NUNC) are coated overnight at 4.degree. C. with an Fab form of the antibody to be tested at a concentration of 2 μg/ml in PBS, and blocked with PBS, 0.5% BSA, and 0.05% Tween20 (PBT) for 211 at room temperature. Serial dilutions of phage displaying hVEGF alanine point mutants (residues 8-109 form) or wild type hVEGF (8-109) in PBT are first incubated on the Fab-coated plates for 15 min at room temperature, and the plates are washed with PBS, 0.05% Tween20 (PBST). The bound phage is detected with an anti-M13 monoclonal antibody horseradish peroxidase (Amersham Pharmacia) conjugate diluted 1:5000 in PBT, developed with 3,3′, 5,5′-tetramethylbenzidine (TMB, Kirkegaard & Perry Labs, Gaithersburg, M D) substrate for approximately 5 min, quenched with 1.0 M H.sub.3PO.sub.4, and read spectrophotometrically at 450 nm. The ratio of IC50 values (IC50,ala/IC50,wt) represents the fold of reduction in binding affinity (the relative binding affinity).

[0185] “Control sequences” when referring to expression means DNA sequences necessary for the expression of an operably linked coding sequence in a particular host organism. The control sequences that are suitable for prokaryotes, for example, include a promoter, optionally an operator sequence, a ribosome binding site, and possibly, other as yet poorly understood sequences. Eukaryotic cells are known to utilize promoters, polyadenylation signals, and enhancers.

[0186] The term “coat protein” means a protein, at least a portion of which is present on the surface of the virus particle. From a functional perspective, a coat protein is any protein which associates with a virus particle during the viral assembly process in a host cell, and remains associated with the assembled virus until it infects another host cell. The coat protein may be the major coat protein or may be a minor coat protein. A “major” coat protein is generally a coat protein which is present in the viral coat at least about 5, at least about 7, at least about 10 copies of the protein or more. A major coat protein may be present in tens, hundreds or even thousands of copies per virion. An example of a major coat protein is the p8 protein of filamentous phage.

[0187] The “detection limit” for a chemical entity in a particular assay is the minimum concentration of that entity which can be detected above the background level for that assay. For example, in the phage ELISA, the “detection limit” for a particular phage displaying a particular antigen binding fragment is the phage concentration at which the particular phage produces an ELISA signal above that produced by a control phage not displaying the antigen binding fragment.

[0188] As used herein “Vh3” refers to a subgroup of antibody variable domains. The sequences of known antibody variable domains have been analyzed for sequence identity and divided into groups. Antibody heavy chain variable domains in subgroup III are known to have a Protein A binding site.

[0189] A “plurality” or “population” of a substance, such as a polypeptide or polynucleotide of the invention, as used herein, generally refers to a collection of two or more types or kinds of the substance. There are two or more types or kinds of a substance if two or more of the substances differ from each other with respect to a particular characteristic, such as the variant amino acid found at a particular amino acid position. For example, there is a plurality or population of polypeptides of the invention if there are two or more polypeptides of the invention that are substantially the same, preferably identical, in sequence except for the sequence of a variant VFR or except for the variant amino acid at a particular solvent accessible amino acid position. In another example, there is a plurality or population of polynucleotides of the invention if there are two or more polynucleotides of the invention that are substantially the same, preferably identical, in sequence except for the sequence that encodes a variant VFR or except for the sequence that encodes a variant amino acid for a particular solvent accessible acid position or structural amino acid position.

[0190] A “fusion protein” and a “fusion polypeptide” refer to a polypeptide having two portions covalently linked together, where each of the portions is a polypeptide having a different property. The property may be a biological property, such as activity in vitro or in vivo. The property may also be a simple chemical or physical property, such as binding to a target antigen, catalysis of a reaction, etc. The two portions may be linked directly by a single peptide bond or through a peptide linker containing one or more amino acid residues. Generally, the two portions and the linker will be in reading frame with each other. In certain embodiments, the two portions of the polypeptide are obtained from heterologous or different polypeptides.

[0191] As used herein, “highly diverse position” refers to a position of an amino acid located in the variable regions of the light and heavy chains that have a number of different amino acids represented at the position when the amino acid sequences of known and/or naturally occurring antibodies or antigen binding fragments are compared. The highly diverse positions are typically in the CDR regions. In one aspect, the ability to determine highly diverse positions in known and/or naturally occurring antibodies is facilitated by the data provided by Kabat, Sequences of Proteins of Immunological Interest (National Institutes of Health, Bethesda, Md., 1987 and 1991). An internet-based database located at http/www.bioinforg.uk.abs.structures.html provides an extensive collection and alignment of light (http/www.bioinf org.uk.abs.lc.align and heavy chain (http/www.bioinf.org.uk.abs.hc.align sequences and facilitates determination of highly diverse positions in these sequences. According to the invention, an amino acid position is highly diverse if it has from about 2 to about 11, from about 4 to about 9, and/or from about 5 to about 7 different possible amino acid residue variations at that position. In some embodiments, an amino acid position is highly diverse if it has at least about 2, at least about 4, at least about 6, and/or at least about 8 different possible amino acid residue variations at that position.

[0192] As used herein, “library” refers to a plurality of antibody or antibody fragment sequences (for example, polypeptides of the invention), or the nucleic acids that encode these sequences, the sequences being different in the combination of variant amino acids that are introduced into these sequences according to the methods of the invention.

[0193] A “mutation” is a deletion, insertion, or substitution of a nucleotide(s) relative to a reference nucleotide sequence, such as a wild type sequence.

[0194] As used herein, “natural” or “naturally occurring” antibodies, refers to antibodies identified from a nonsynthetic source, for example, from a differentiated antigen-specific B cell obtained ex vivo, or its corresponding hybridoma cell line, or from antibodies obtained from the serum of an animal. These antibodies can include antibodies generated in any type of immune response, either natural or otherwise induced. Natural antibodies include the amino acid sequences, and the nucleotide sequences that constitute or encode these antibodies, for example, as identified in the Kabat database. As used herein, natural antibodies are different than “synthetic antibodies”, synthetic antibodies referring to antibody sequences that have been changed from a source or template sequence, for example, by the replacement, deletion, or addition, of an amino acid, or more than one amino acid, at a certain position with a different amino acid, the different amino acid providing an antibody sequence different from the source antibody sequence.

[0195] “Phage display” is a technique by which variant polypeptides are displayed as fusion proteins to at least a portion of coat protein on the surface of phage, e.g., filamentous phage, particles. A utility of phage display lies in the fact that large libraries of randomized protein variants can be rapidly and efficiently sorted for those sequences that bind to a target antigen with high affinity. Display of peptide and protein libraries on phage has been used for screening millions of polypeptides for ones with specific binding properties. Polyvalent phage display methods have been used for displaying small random peptides and small proteins through fusions to either gene III or gene VIII of filamentous phage. Wells and Lowman, Curr. Opin. Struct. Biol., 3:355-362 (1992), and references cited therein. In monovalent phage display, a protein or peptide library is fused to a gene III or a portion thereof, and expressed at low levels in the presence of wild type gene III protein so that phage particles display one copy or none of the fusion proteins. Avidity effects are reduced relative to polyvalent phage so that sorting is on the basis of intrinsic ligand affinity, and phagemid vectors are used, which simplify DNA manipulations. Lowman and Wells, Methods. A companion to Methods in Enzymology, 3:205-0216 (1991).

[0196] A “phagemid” is a plasmid vector having a bacterial origin of replication, e.g., Co1E1, and a copy of an intergenic region of a bacteriophage. The phagemid may be used on any known bacteriophage, including filamentous bacteriophage and lambdoid bacteriophage.

[0197] The plasmid will also generally contain a selectable marker for antibiotic resistance. Segments of DNA cloned into these vectors can be propagated as plasmids. When cells harboring these vectors are provided with all genes necessary for the production of phage particles, the mode of replication of the plasmid changes to rolling circle replication to generate copies of one strand of the plasmid DNA and package phage particles. The phagemid may form infectious or non-infectious phage particles. This term includes phagemids which contain a phage coat protein gene or fragment thereof linked to a heterologous polypeptide gene as a gene fusion such that the heterologous polypeptide is displayed on the surface of the phage particle.

[0198] The term “phage vector” means a double stranded replicative form of a bacteriophage containing a heterologous gene and capable of replication. The phage vector has a phage origin of replication allowing phage replication and phage particle formation. In certain embodiments, the phage is a filamentous bacteriophage, such as an M13, fl, fd, Pf3 phage or a derivative thereof, or a lambdoid phage, such as lambda, 21, phi80, phi81, 82, 424, 434, etc., or a derivative thereof.

[0199] A “transcription regulatory element” will contain one or more of the following components: an enhancer element, a promoter, an operator sequence, a repressor gene, and a transcription termination sequence. These components are well known in the art. U.S. Pat. No. 5,667,780.

[0200] A “transformant” is a cell which has taken up and maintained DNA as evidenced by the expression of a phenotype associated with the DNA (e.g., antibiotic resistance conferred by a protein encoded by the DNA).

[0201] “Transformation” means a process whereby a cell takes up DNA and becomes a “transformant”. The DNA uptake may be permanent or transient.

[0202] An “affinity matured” antibody is one with one or more alterations in one or more CDRs thereof which result in an improvement in the affinity of the antibody for antigen, compared to a parent antibody which does not possess those alteration(s). In certain embodiments, affinity matured antibodies will have nanomolar or even picomolar affinities for the target antigen. Affinity matured antibodies are produced by procedures known in the art. Marks et al. Bio/Technology 10:779-783 (1992) describes affinity maturation by VH and VL domain shuffling. Random mutagenesis of CDR and/or framework residues is described by: Barbas et al. Proc Nat. Acad. Sci, USA 91:3809-3813 (1994); Schier et al. Gene 169:147-155 (1995); Yelton et al. J. Immunol. 155:1994-2004 (1995); Jackson et al., J. Immunol. 154(7):3310-9 (1995); and Hawkins et al., J. Mol. Biol. 226:889-896 (1992).

[0203] The “Kd” or “Kd value” is the dissociation constant for the interaction of one molecule with another. In one embodiment, the Kd value is measured by a radiolabeled protein binding assay (RIA). In one embodiment, an RIA for a her3 or PCSK9 or Trk can be performed with the Fab version of an anti-her3 or PCSK9 antibody or any other antibody and a her3 or PCSk9 molecule respectively as described by the following assay that measures solution binding affinity of Fabs for her3 or PCSk9 by equilibrating a Fab with a minimal concentration of (.sup.125I)-labeled Her3 or PCSk9 in the presence of a titration series of unlabeled her3 or PCSK9 molecule respectively, then capturing bound Her3 or PCSK9 molecule respectively with an anti-Fab antibody-coated plate (Chen, et al., (1999) J. Mol. Biol. 293:865-881). To establish conditions for the assay, microtiter plates (Dynex) are coated overnight with 5 .mu·g/ml of a capturing anti-Fab antibody (Cappel Labs) in 50 mM sodium carbonate (pH 9.6), and subsequently blocked with 2% (w/v) bovine serum albumin in PBS for two to five hours at room temperature (approximately 23.degree. C.). In a non-absorbent plate (Nunc #269620), 100 pM or 26 pM [.sup.125I] her3 or PCSK9 are mixed with serial dilutions of a Fab of interest, e.g., Fab-12 (Presta et al., (1997) Cancer Res. 57:4593-4599), The Fab of interest is then incubated overnight; however, the incubation may continue for 65 hours to insure that equilibrium is reached. Thereafter, the mixtures are transferred to the capture plate for incubation at room temperature for one hour. The solution is then removed and the plate washed eight times with 0.1% Tween-20 in PBS. When the plates had dried, 150 .mu·l/well of scintillant (MicroScint-20; Packard) is added, and the plates are counted on a Topcount gamma counter (Packard) for ten minutes. Concentrations of each Fab that give less than or equal to 20% of maximal binding are chosen for use in competitive binding assays.

[0204] According to another embodiment the Kd or Kd value can be measured by using surface plasmon resonance assays using a BIAcore™-2000 or a BIAcore™-3000 instrument (BIAcore, Inc., Piscataway, N.J.). In certain embodiments, the Kd value of anti-her3 or PCSk9 molecule antibodies for her3 or PCSK9 molecule respectively is determined using BIAcore™ analysis according to the following protocol. Briefly, carboxymethylated dextran biosensor chips (CM5, BIAcore Inc.) are activated with N-ethyl-N′-(3-dimethylaminopropyl)-carbodiimide hydrochloride (EDC) and N-hydroxysuccinimide (NHS) according to the supplier's instructions. Human or murine her3 or PCSK9 molecule is diluted with 10 mM sodium acetate, pH 4.8, to 5 .mu·g/ml (.about.0.2 .mu·M) before injection at a flow rate of 5 .mu·l/minute to achieve approximately 10 response units (RU) of coupled protein. Following the injection of human her3 or PCSK9, 1M ethanolamine is injected to block unreacted groups. For kinetics measurements, two-fold serial dilutions of Fab (0.78 nM to 500 nM) are injected in PBS with 0.05% Tween 20 (PBST) at 25.degree. C. at a flow rate of approximately 25 .mu·l/min. Association rates (k.sub.on) and dissociation rates (k.sub.off) are calculated using a simple one-to-one Langmuir binding model (BIAcore Evaluation Software version 3.2) by simultaneously fitting the association and dissociation sensorgram. The equilibrium dissociation constant (Kd) was calculated as the ratio k.sub.off/k.sub.on. See, e.g., Chen, Y., et al., (1999) J. Mol. Biol. 293:865-881.

[0205] A “disorder” is any condition that would benefit from treatment with a substance/molecule or method of the invention. This includes chronic and acute disorders or diseases including those pathological conditions which predispose the mammal to the disorder in question. Non-limiting examples of disorders to be treated herein include malignant and benign tumors; non-leukemias and lymphoid malignancies; neuronal, glial, astrocytal, hypothalamic and other glandular, macrophagal, epithelial, stromal and blastocoelic disorders; and inflammatory, immunologic related disorders.

[0206] The term abnormal angiogenesis occurs when new blood vessels either grow excessively, insufficiently or inappropriately (e.g., the location, timing or onset of the angiogenesis being undesired from a medical standpoint) in a diseased state or such that it causes a diseased state. Excessive, inappropriate or uncontrolled angiogenesis occurs when there is new blood vessel growth that contributes to the worsening of the diseased state or causes a diseased state, such as in cancer, especially vascularized solid tumors and metastatic tumors (including colon, lung cancer (especially small-cell lung cancer), or prostate cancer), diseases caused by ocular neovascularisation, especially diabetic blindness, retinopathies, primarily diabetic retinopathy or age-induced macular degeneration and rubeosis; psoriasis, psoriatic arthritis, haemangioblastoma such as haemangioma; inflammatory renal diseases, such as glomerulonephritis, especially mesangioproliferative glomerulonephritis, haemolytic uremic syndrome, diabetic nephropathy or hypertensive neplirosclerosis; various imflammatory diseases, such as arthritis, especially rheumatoid arthritis, inflammatory bowel disease, psorsasis, sarcoidosis, arterial arteriosclerosis and diseases occurring after transplants, endometriosis or chronic asthma and more than 70 other conditions. The new blood vessels can feed the diseased tissues, destroy normal tissues, and in the case of cancer, the new vessels can allow tumor cells to escape into the circulation and lodge in other organs (tumor metastases). Insufficient angiogenesis occurs when there is inadequate blood vessels growth that contributes to the worsening of a diseased state, e.g., in diseases such as coronary artery disease, stroke, and delayed wound healing. Further, ulcers, strokes, and heart attacks can result from the absence of angiogenesis that normally required for natural healing. The present invention contemplates treating those patients that are at risk of developing the above-mentioned illnesses.

[0207] Other patients that are candidates for receiving the antibodies or polypeptides of this invention have, or are at risk for developing, abnormal proliferation of fibrovascular tissue, acne rosacea, acquired immune deficiency syndrome, artery occlusion, atopic keratitis, bacterial ulcers, Bechets disease, blood bone tumors, carotid obstructive disease, choroidal neovascularization, chronic inflammation, chronic retinal detachment, chronic uveitis, chronic vitritis, contact lens overwear, corneal graft rejection, corneal neovascularization, corneal graft neovascularization, Crohn's disease, Bales disease, epidemic keratoconjunctivitis, fungal ulcers, Herpes simplex infections, Herpes zoster infections, hyperviscosity syndromes, Kaposi's sarcoma, leukemia, lipid degeneration, Lyme's disease, marginal keratolysis, Mooren ulcer, Mycobacteria infections other than leprosy, myopia, ocular neovascular disease, optic pits, Osler-Weber syndrome (Osler-Weber-Rendu, osteoarthritis, Pagets disease, pars planitis, pemphigoid, phylectenulosis, polyarteritis, post-laser complications, protozoan infections, pseudoxanthoma elasticum, pterygium keratitis sicca, radial keratotomy, retinal neovascularization, retinopathy of prematurity, retrolental fibroplasias, sarcoid, scleritis, sickle cell anemia, Sogrens syndrome, solid tumors, Stargarts disease, Steven's Johnson disease, superior limbic keratitis, syphilis, systemic lupus, Terrien's marginal degeneration, toxoplasmosis, trauma, tumors of Ewing sarcoma, tumors of neuroblastoma, tumors of osteosarcoma, tumors of retinoblastoma, tumors of rhabdomyosarcoma, ulcerative colitis, vein occlusion, Vitamin A deficiency and Wegeners sarcoidosis, undesired angiogenesis associated with diabetes, parasitic diseases, abnormal wound healing, hypertrophy following surgery, injury or trauma, inhibition of hair growth, inhibition of ovulation and corpus luteum formation, inhibition of implantation and inhibition of embryo development in the uterus.

[0208] Anti-angiogenesis therapies are useful in the general treatment of graft rejection, lung inflammation, nephrotic syndrome, preeclampsia, pericardial effusion, such as that associated with pericarditis, and pleural effusion, diseases and disorders characterized by undesirable vascular permeability, e.g., edema associated with brain tumors, ascites associated with malignancies, Meigs' syndrome, lung inflammation, nephrotic syndrome, pericardial effusion, pleural effusion, permeability associated with cardiovascular diseases such as the condition following myocardial infarctions and strokes and the like.

[0209] Other angiogenesis-dependent diseases according to this invention include angiofibroma (abnormal blood of vessels which are prone to bleeding), neovascular glaucoma (growth of blood vessels in the eye), arteriovenous malformations (abnormal communication between arteries and veins), nonunion fractures (fractures that will not heal), atherosclerotic plaques (hardening of the arteries), pyogenic granuloma (common skin lesion composed of blood vessels), scleroderma (a form of connective tissue disease), hemangioma (tumor composed of blood vessels), trachoma (leading cause of blindness in the third world), hemophilic joints, vascular adhesions and hypertrophic scars (abnormal scar formation).

[0210] The terms “cell proliferative disorder” and “proliferative disorder” refer to disorders that are associated with some degree of abnormal cell proliferation. In one embodiment, the cell proliferative disorder is cancer.

[0211] “Tumor”, as used herein, refers to all neoplastic cell growth and proliferation, whether malignant or benign, and all pre-cancerous and cancerous cells and tissues. The terms “cancer”, “cancerous”, “cell proliferative disorder”, “proliferative disorder” and “tumor” are not mutually exclusive as referred to herein.

[0212] The terms “cancer” and “cancerous” refer to or describe the physiological condition in mammals that is typically characterized by unregulated cell growth/proliferation. Examples of cancer include but are not limited to, carcinoma, lymphoma, blastoma, sarcoma, and leukemia. More particular examples of such cancers include squamous cell cancer, small-cell lung cancer, non-small cell lung cancer, adenocarcinoma of the lung, squamous carcinoma of the lung, cancer of the peritoneum, hepatocellular cancer, gastrointestinal cancer, pancreatic cancer, glioblastoma, cervical cancer, ovarian cancer, liver cancer, bladder cancer, hepatoma, breast cancer, colon cancer, colorectal cancer, endometrial or uterine carcinoma, salivary gland carcinoma, kidney cancer, liver cancer, prostate cancer, vulval cancer, thyroid cancer, hepatic carcinoma and various types of head and neck cancer.

[0213] The term “immune related disease” means a disease in which a component of the immune system of a mammal causes, mediates or otherwise contributes to morbidity in the mammal. Also included are diseases in which stimulation or intervention of the immune response has an ameliorative effect on progression of the disease. Included within this term are autoimmune diseases, immune-mediated inflammatory diseases, non-immune-mediated inflammatory diseases, infectious diseases, and immunodeficiency diseases. Examples of immune-related and inflammatory diseases, some of which are immune or I cell mediated, which can be treated according to the invention include systemic lupus erythematosis, rheumatoid arthritis, juvenile chronic arthritis, spondyloarthropathies, systemic sclerosis (scleroderma), idiopathic inflammatory myopathies (dermatomyositis, polymyositis), Sjogren's syndrome, systemic vasculitis, sarcoidosis, autoimmune hemolytic anemia (immune pancytopenia, paroxysmal nocturnal hemoglobinuria), autoimmune thrombocytopenia (idiopathic thrombocytopenic purpura, immune-mediated thrombocytopenia), thyroiditis (Grave's disease, Hashimotols thyroiditis, juvenile lymphocytic thyroiditis, atrophic thyroiditis), diabetes mellitus, immune-mediated renal disease (glomerulonephritis, tubulointerstitial nephritis), demyelinating diseases of the central and peripheral nervous systems such as multiple sclerosis, idiopathic demyelinating polyneuropathy or Guillain-Barc syndrome, and chronic inflammatory demyelinating polyneuropathy, hepatobiliary diseases such as infectious hepatitis (hepatitis A, B, C, D, E and other non-hepatotropic viruses), autoimmune chronic active hepatitis, primary biliary cirrhosis, granulomatous hepatitis, and sclerosing cholangitis, inflammatory and fibrotic lung diseases such as inflammatory bowel disease (ulcerative colitis: Crohns disease), gluten-sensitive enteropathy, and Whipples disease, autoimmune or immune-mediated skin diseases including bullous skin diseases, erythema multiform and contact dermatitis, psoriasis, allergic diseases such as asthma, allergic rhinitis, atopic dermatitis, food hypersensitivity and urticaria, and immunologic diseases of the lung such as eosinophilic pneumonias.

[0214] As used herein, “treatment” refers to clinical intervention in an attempt to alter the natural course of the individual or cell being treated, and can be performed either for prophylaxis or during the course of clinical pathology. Desirable effects of treatment include preventing occurrence or recurrence of disease, alleviation of symptoms, diminishment of any direct or indirect pathological consequences of the disease, preventing metastasis, decreasing the rate of disease progression, amelioration or palliation of the disease state, and remission or improved prognosis. In some embodiments, antibodies of the invention are used to delay development of a disease or disorder.

[0215] An “effective amount” refers to an amount effective, at dosages and for periods of time necessary, to achieve the desired therapeutic or prophylactic result.

[0216] A “therapeutically effective amount” of a substance/molecule of the invention, agonist or antagonist may vary according to factors such as the disease state, age, sex, and weight of the individual, and the ability of the substance/molecule, agonist or antagonist to elicit a desired response in the individual. A therapeutically effective amount is also one in which any toxic or detrimental effects of the substance/molecule, agonist or antagonist are outweighed by the therapeutically beneficial effects. A “prophylactically effective amount” refers to an amount effective, at dosages and for periods of time necessary, to achieve the desired prophylactic result. Typically but not necessarily, since a prophylactic dose is used in subjects prior to or at an earlier stage of disease, the prophylactically effective amount will be less than the therapeutically effective amount.

[0217] “Mammal” for purposes of treatment refers to any animal classified as a mammal, including humans, domestic and farm animals, nonhuman primates, and zoo, sports, or pet animals, such as dogs, horses, cats, cows, etc.

[0218] The term “anti-neoplastic composition” refers to a composition useful in treating cancer comprising at least one active therapeutic agent, e.g., “anti-cancer agent.” Examples of therapeutic agents (anti-cancer agents) include, but are not limited to, e.g., chemotherapeutic agents, growth inhibitory agents, cytotoxic agents, agents used in radiation therapy, anti-angiogenesis agents, apoptotic agents, anti-tubulin agents, and other-agents to treat cancer such as, anti-CD20 antibodies, an epidermal growth factor receptor (EGFR) antagonist (e.g., a tyrosine kinase inhibitor), HER1/EGFR inhibitor (e.g., erlotinib (Tarceva™), platelet derived growth factor inhibitors (e.g., Gleevec™ (Imatinib Mesylate)), a COX-2 inhibitor (e.g., celecoxib), interferons, cytokines, antagonists (e.g., neutralizing antibodies) that bind to one or more of the targets molecule and other bioactive and organic chemical agents, etc. Combinations thereof are also included in the invention.

[0219] The term “epitope tagged” when used herein refers to an antibody mutant fused to an “epitope tag”. The epitope tag polypeptide has enough residues to provide an epitope against which an antibody thereagainst can be made, yet is short enough such that it does not interfere with activity of the antibody mutant. The epitope tag preferably also is fairly unique so that the antibody thereagainst does not substantially cross-react with other epitopes. Suitable tag polypeptides generally have at least 6 amino acid residues and usually between about 8-50 amino acid residues (in certain embodiments between about 9-30 residues). Examples include, but are not limited to, the flu HA tag polypeptide and its antibody 12CA5 (Field et al. Mol. Cell. Biol. 8:2159-2165 (1988)); the c-myc tag and the 8F9, 3C7, 6E10, G4, B7 and 9E10 antibodies thereagainst (Evan et al., Mol. Cell. Biol. 5(12):3610-3616 (1985)); and the Herpes Simplex virus glycoprotein D (gD) tag and its antibody (Paborsky et al., Protein Engineering 3(6):547-553 (1990)). In certain embodiments, the epitope tag is a “salvage receptor binding epitope”.

[0220] The term “cytotoxic agent” as used herein refers to a substance that inhibits or prevents the function of cells and/or causes destruction of cells. The term is intended to include radioactive isotopes (e.g., At.sup.211, I.sup.131, I.sup.125, Y.sup.90, Re.sup.186, Re.sup.188, Sm.sup.153, Bi.sup.212, P.sup.32 and radioactive isotopes of Lu), chemotherapeutic agents e.g. methotrexate, adriamicin, vinca alkaloids (vincristine, vinblastine, etoposide), doxorubicin, melphalan, mitomycin C, chlorambucil, daunorubicin or other intercalating agents, enzymes and fragments thereof such as nucleolytic enzymes, antibiotics, and toxins such as small molecule toxins or enzymatically active toxins of bacterial, fungal, plant or animal origin, including fragments and/or variants thereof, and the various antitumor or anticancer agents disclosed below. Other cytotoxic agents are described below. A tumoricidal agent causes destruction of tumor cells.

[0221] A “chemotherapeutic agent” is a chemical compound useful in the treatment of cancer. Examples of chemotherapeutic agents include alkylating agents such as thiotepa and CYTOXAN® cyclosphosphamide; alkyl sulfonates such as busulfan, improsulfan and piposulfan; aziridines such as benzodopa, carboquone, meturedopa, and uredopa; ethylenimines and methylamelamines including altretamine, triethylenemelamine, trietylenephosphoramide, triethiylenethiophosphoramide and trimethylolomelamine; acetogenins (especially bullatacin and bullatacinone); delta-9-tetrahydrocannabinol (dronabinol, MARINOL®); beta-lapachone; lapachol; colchicines; betulinic acid; a camptothecin (including the synthetic analogue topotecan (HYCAMTIN®), CPT-11 (irinotecan, CAMPTOSAR®), acetylcamptothecin, scopolectin, and 9-aminocamptothecin); bryostatin; callystatin; CC-1065 (including its adozelesin, carzelesin and bizelesin synthetic analogues); podophyllotoxin; podophyllinic acid; teniposide; cryptophycins (particularly cryptophycin I and cryptophycin 8); dolastatin; duocarmycin (including the synthetic analogues, KW-2189 and CB1-TM1); eleutherobin; pancratistatin; a sarcodictyin; spongistatin; nitrogen mustards such as chlorambucil, chlornaphazine, cholophosphamide, estramustine, ifosfamide, mechlorethamine, mechlorethamine oxide hydrochloride, melphalan, novembichin, phenesterine, prednimustine, trofosfamide, uracil mustard; nitrosureas such as carmustine, chlorozotocin, fotemustine, lomustine, nimustine, and ranimnustine; antibiotics such as the enediyne antibiotics (e.g., calicheamicin, especially calicheamicin gamma II and calicheamicin omegaI1 (see, e.g., Agnew, Chem. Intl. Ed. Engl., 33: 183-186 (1994)); dynemicin, including dynemicin A; an esperamicin; as well as neocarzinostatin chromophore and related chromoprotein enediyne antibiotic chromophores), aclacinomysins, actinomycin, authramycin, azaserine, bleomycins, cactinomycin, carabicin, caminomycin, carzinophilin, chromomycinis, dactinomycin, daunorubicin, detorubicin, 6-diazo-5-oxo-L-norleucine, ADRIAMYCIN®(doxorubicin (including morpholino-doxorubicin, cyanomorpholino-doxorubicin, 2-pyrrolino-doxorubicin and deoxydoxorubicin), epirubicin, esorubicin, idarubicin, marcellomycin, mitomycins such as mitomycin C, mycophenolic acid, nogalamycin, olivomycins, peplomycin, potfiromycin, puromycin, quelamycin, rodorubicin, streptonigrin, streptozocin, tubercidin, ubenimex, zinostatin, zorubicin; anti-metabolites such as methotrexate and 5-fluorouracil (5-FU); folic acid analogues such as denopterin, methotrexate, pteropterin, trimetrexate; purine analogs such as fludarabine, 6-mercaptopurine, thiamiprine, thioguanine; pyrimidine analogs such as ancitabine, azacitidine, 6-azauridine, carmofur, cytarabine, dideoxyuridine, doxifluridine, enocitabine, floxuridine; androgens such as calusterone, dromostanolone propionate, epitiostanol, mepitiostane, testolactone; anti-adrenals such as aminoglutethimide, mitotane, trilostane; folic acid replenisher such as frolinic acid; aceglatone; aldophosphamide glycoside; aminolevulinic acid; eniluracil; amsacrine; bestrabucil; bisantrene; edatraxate; defofamine; demecolcine; diaziquone; elformithine; elliptinium acetate; an epothilone; etoglucid; gallium nitrate; hydroxyurea; lentinan; lonidainine; maytansinoids such as maytansine and ansamitocins; mitoguazone; mitoxantrone; mopidanmol; nitraerine; pentostatin; phenamet; pirarubicin; losoxantrone; 2-ethylhydrazide; procarbazine; PSK® polysaccharide complex (JHS Natural Products, Eugene, Oreg.); razoxane; rhizoxin; sizofiran; spirogermanium; tenuazonic acid; triaziquone; 2,2′,2″-trichlorotriethylamine; trichothecenes (especially T-2 toxin, verracurin A, roridin A and anguidine); urethan; vindesine (ELDISINE®, FILDESIN®); dacarbazine; mannomustine; mitobronitol; mitolactol; pipobroman; gacytosine; arabinoside (“Ara-C”); thiotepa; taxoids, e.g., TAXOL®paclitaxel (Bristol-Myers Squibb Oncology, Princeton, N.J.), ABRAXANE™ Cremophor-free, albumin-engineered nanoparticle formulation of paclitaxel (American Pharmaceutical Partners, Schaumberg, Ill.), and TAXOTERE® doxetaxel (Rhone-Poulenc Rorer, Antony, France); chloranbucil; gemcitabine (GEMZAR®); 6-thioguanine; mercaptopurine; methotrexate; platinum analogs such as cisplatin and carboplatin; vinblastine (VELBAN®); platinum; etoposide (VP-16); ifosfamide; mitoxantrone; vincristine (ONCOVIN®); oxaliplatin; leucovovin; vinorelbine (NAVELBINE®); novantrone; edatrexate; daunomycin; aminopterin; ibandronate; topoisomerase inhibitor RFS 2000; difluoromethylornithine (DMFO); retinoids such as retinoic acid; capecitabine (XELODA®); pharmaceutically acceptable salts, acids or derivatives of any of the above; as well as combinations of two or more of the above such as CHOP, an abbreviation for a combined therapy of cyclophosphamide, doxorubicin, vincristine, and prednisolone, and FOLFOX, an abbreviation for a treatment regimen with oxaliplatin (ELOXATIN™) combined with 5-FU and leucovovin.

[0222] An “isolated” nucleic acid molecule is a nucleic acid molecule that is identified and separated from at least one contaminant nucleic acid molecule with which it is ordinarily associated in the natural source of the antibody nucleic acid. An isolated nucleic acid molecule is other than in the form or setting in which it is found in nature. Isolated nucleic acid molecules therefore are distinguished from the nucleic acid molecule as it exists in natural cells. However, an isolated nucleic acid molecule includes a nucleic acid molecule contained in cells that ordinarily express the antibody where, for example, the nucleic acid molecule is in a chromosomal location different from that of natural cells.

[0223] The expression “control sequences” refers to DNA sequences necessary for the expression of an operably linked coding sequence in a particular host organism. The control sequences that are suitable for prokaryotes, for example, include a promoter, optionally an operator sequence, and a ribosome binding site. Eukaryotic cells are known to utilize promoters, polyadenylation signals, and enhancers.

[0224] A “variant” or “mutant” of a starting or reference polypeptide (e.g., a source antibody or its variable domain(s)/CDR(s)), such as a fusion protein (polypeptide) or a heterologous polypeptide (heterologous to a phage), is a polypeptide that 1) has an amino acid sequence different from that of the starting or reference polypeptide and 2) was derived from the starting or reference polypeptide through either natural or artificial (manmade) mutagenesis. Such variants include, for example, deletions from, and/or insertions into and/or substitutions of, residues within the amino acid sequence of the polypeptide of interest. For example, a fusion polypeptide of the invention generated using an oligonucleotide comprising a restricted codon set that encodes a sequence with a variant amino acid (with respect to the amino acid found at the corresponding position in a source antibody/antigen binding fragment) would be a variant polypeptide with respect to a source antibody and/or antigen binding fragment and/or CDR/VFR. Thus, a variant CDR refers to a CDR comprising a variant sequence with respect to a starting or reference polypeptide sequence (such as that of a source antibody and/or antigen binding fragment and/or CDR). Likewise, a variant “Junctional region” mutant comprises a variant sequence with respect to a starting or reference polypeptide sequence (such as that of a source antibody and/or antigen binding fragment and/or Framework sequence). A variant amino acid, in this context, refers to an amino acid different from the amino acid at the corresponding position in a starting or reference polypeptide sequence (such as that of a source antibody and/or antigen binding fragment and/or CDR). Any combination of deletion, insertion, and substitution may be made to arrive at the final variant or mutant construct, provided that the final construct possesses the desired functional characteristics. In some of the examples described herein, binder sequences contain point mutations such as deletions or additions. The amino acid changes also may alter post-translational processes of the polypeptide, such as changing the number or position of glycosylation sites. Methods for generating amino acid sequence variants of polypeptides are described in U.S. Pat. No. 5,534,615, expressly incorporated herein by reference.

[0225] In one aspect, the restricted repertoire of amino acids intended to occupy one or more of the highly diverse positions in one of more of the VFR's or CDRs of a target antibody, e.g., PCSK9 or her3 are determined (based on the desire of the practitioner, which can be based on any of a number of criteria, including specific amino acids desired for particular positions, specific amino acid(s) desired to be absent from a particular position, size of library desired, characteristic of antigen binders sought, etc.).

[0226] Heavy chain CDR3s (CDRH3s) in known antibodies have diverse sequences, structural conformations, and lengths. CDRH3s are often found in the middle of the antigen binding pocket and often participate in antigen contact. The design of CDRH3 may be developed separately from that of the other CDRs because it can be difficult to predict the structural conformation of CDRH3 and the amino acid diversity in this region is especially diverse in known antibodies. In accordance with the present invention, CDRH3 is designed to generate diversity at specific positions within CDRH3, for e.g., positions X1, X2, X3 (for e.g., according to Kabat numbering). In some embodiments, diversity is also generated by varying CDRH3 length using restricted codon sets. Length diversity can be of any range determined empirically to be suitable for generating a population of polypeptides containing substantial proportions of antigen binding proteins. For example, polypeptides comprising variant CDRH3 can be generated having the sequence (X1)_{.n-A-M}, wherein X1 is an amino acid encoded by a restricted codon set, and n is of various lengths, for example, n=3-20, 5-20, 7-20, 5-18 or 7-18. Other examples of possible n values are 5, 6, 7, 8, 9, 10, 11, 12, 13, 14, 15, 16, 17, 18, 19 and 20. Illustrative embodiments of oligonucleotides are detailed in the experimental section below. The same applied to the design of the VFR or junctional regions.

[0227] The inventors contemplate that the sequence diversity of libraries created by introduction of variant amino acids in a particular Junctional Region in addition to or alternative to a particular CDR, for e.g., CDRH1, 2 or 3, can be increased by combining the variant CDR or JR with other CDRs comprising variations in other regions of the antibody, specifically in other CDRs of either the light or heavy chain variable sequences or other junctional regions. It is contemplated that the nucleic acid sequences that encode members of this set can be further diversified by introduction of other variant amino acids in the CDRs of either the light or heavy chain sequences, via codon sets or junctional regions. Thus, for example, in one embodiment, CDRH3 sequences or the attendant JR in contact with the CDRH3 from fusion polypeptides that bind a target antigen can be combined with diversified CDRL3, CDRH1, or CDRH2 sequences, or any combination of diversified CDRs or variant JR's/VFR's.

[0228] It should be noted that contrary to conventional wisdom, in certain embodiments, framework residues in a junctional region (VFR/JR) may be varied relative to the sequence of a source antibody or antigen binding fragment, for example, to reflect a consensus sequence or to improve stability or display. Heavy chain framework residues may be changed to reflect framework consensus sequence.

[0229] Typically, a codon set is represented by three capital letters eg. KMT, TMT and the like. TUB Codes

[0230] G Guanine

[0231] A Adenine

[0232] T Thymine

[0233] C Cytosine

[0234] R (A or G)

[0235] Y (C or T)

[0236] M (A or C)

[0237] K (G or T)

[0238] S(C or G)

[0239] W (A or T)

[0240] H (A or C or T)

[0241] B (C or G or T)

[0242] V (A or C or O)

[0243] D (A or G or T)

[0244] N (A or C or G or T)

[0245] For example, in the codon set TMT, T is the nucleotide thymine; and M can be A or C. This codon set can present multiple codons and can encode only a limited number of amino acids, namely tyrosine and serine.

[0246] In one aspect, the invention provides vector constructs for generating fusion polypeptides that bind with significant affinity to potential ligands. These constructs may further comprise a dimerizable domain that when present in a fusion polypeptide provides for increased tendency for heavy chains to dimerize to form dimers of Fab or Fab′ antibody fragments/portions. These dimerization domains may include, eg. a heavy chain hinge sequence that may be present in the fusion polypeptide. Dimerization domains in fusion phage polypeptides bring two sets of fusion polypeptides (LC/HC-phage protein/fragment (such as pIII)) together, thus allowing formation of suitable linkages (such as interheavy chain disulfide bridges) between the two sets of fusion polypeptide. Vector constructs containing such dimerization domains can be used to achieve divalent display of antibody variable domains, for example the diversified fusion proteins described herein, on phage. Preferably, the intrinsic affinity of each monomeric antibody fragment (fusion polypeptide) is not significantly altered by fusion to the dimerization domain. Preferably, dimerization results in divalent phage display which provides increased avidity of phage binding, with significant decrease in off-rate, which can be determined by methods known in the art and as described herein. Dimerization domain-containing vectors of the invention may or may not also include an amber stop codon after the dimerization domain.

[0247] A “wild type” or “reference” sequence or the sequence of a “wild type” or “reference” protein/polypeptide, such as a coat protein, or a CDR or variable domain of a source antibody, maybe the reference sequence from which variant polypeptides are derived through the introduction of mutations. In general, the “wild type” sequence for a given protein is the sequence that is most common in nature. Similarly, a “wild type” gene sequence is the sequence for that gene which is most commonly found in nature. Mutations may be introduced into a “wild type” gene (and thus the protein it encodes) either through natural processes or through man induced means. The products of such processes are “variant” or “mutant” forms of the original “wild type” protein or gene.

[0248] A “plurality” of a substance, such as a polypeptide or polynucleotide of the invention, as used herein, generally refers to a collection of two or more types or kinds of the substance. There are two or more types or kinds of a substance if two or more of the substances differ from each other with respect to a particular characteristic, such as the variant amino acid found at a particular amino acid position. For example, there is a plurality of polypeptides of the invention if there are two or more polypeptides of the invention that are substantially the same, or are identical in sequence except for the sequence of a variant CDR or except for the variant amino acid at a particular solvent accessible and highly diverse amino acid position. In another example, there is a plurality of polynucleotides of the invention if there are two or more polynucleotides of the invention that are substantially the same or identical in sequence except for the sequence that encodes a variant CDR and/or Junctional region.

[0249] The invention provides methods for generating and isolating novel target antigen binding polypeptides, such as antibodies or antigen binding fragments, that can have a high affinity for a selected antigen. A plurality of different binder polypeptides are prepared by mutating (diversifying) one or more selected amino acid positions in a source antibody light chain variable domain and/or heavy chain variable domain with restricted codon sets to generate a library of binder polypeptides with variant amino acids in at least one CDR sequence, wherein the number of types of variant amino acids is kept to a minimum (i.e., 19 or fewer, 15 or fewer, 10 or fewer, 8 or fewer, 6 or fewer, 4 or fewer, or only 2, but generally at least 2). The amino acid positions include those that are solvent accessible, for example as determined by analyzing the structure of a source antibody, and/or that are highly diverse among known and/or natural occurring immunoglobulin polypeptides. A further advantage afforded by the limited nature of diversification of the invention is that additional amino acid positions other than those that are highly diverse and/or solvent accessible can also be diversified in accordance with the need or desire of the practitioner; examples of these embodiments are described herein.

[0250] The diversity of the library of the polypeptides comprising variant CDRs and/or junctional regions may be designed using codon sets that encode only a limited number of amino acids, such that a minimum but sufficient amount of sequence diversity is introduced into a CDR or Junctional region. The number of positions mutated in the CDR or Junctional region is minimized and the variant amino acids at each position are designed to include a limited number of amino acids, independent of the amino acids that deemed to be commonly occurring at that position in known and/or naturally occurring CDRs or framework sequences. In certain embodiments, a single antibody, including at least one CDR and one Framework sequence, is used as the source antibody. It is surprising that a library of antibody variable domains having diversity in sequences and size can be generated using a single source antibody as a template and targeting diversity to particular positions using an unconventionally limited number of amino acid substitutions.

### MODES OF THE INVENTION

[0251] A diverse library of antibody variable domains particular variant CDRs and/or variant JR's is useful to identify novel antigen binding molecules having high affinity. Generating a library with antibody variable domains with a high level of diversity and that are structurally stable allows for the isolation of high affinity binders and for antibody variable domains that can more readily be produced in cell culture on a large scale. The present invention is based on the showing that regions of an antibody variable domain particularly a JR region with or without the attendant CDR with which it is in contact with can be varied, preferably utilizing one of a targeted or random approach.

[0252] In one aspect of the invention, high quality libraries of antibody variable domains are generated. The libraries have restricted diversity of different sequences of JR and optionally CDR sequences, for example, diversity of the antibody variable domains. The libraries include high affinity binding antibody variable domains for one or more antigens, including, for example, human PCSK9NCBI Reference Sequence: NP_{—}777596.2), murine PCSK9 (NCBI Reference Sequence: NP_{—}705793.1), mouse IL-13 (R) (GenBank: AAB50695.1); Her3 (NCBI Reference Sequence: NP_{—}001973.2); mouse EphA2 (NCBI Reference Sequence: NP_{—}034269.2), Human herpesvirus 1 glycoprotein E (g) (NCBI Reference Sequence: NP_{—}044538.1); TrkA (GenBank: BAA34355.1). In certain aspects, the diversity in the library is designed by selecting highly diverse amino acid positions within a target JR and optionally a target CDR in a single source antibody and mutating those positions in at least one JR, and optionally at least one CDR using restricted codon sets. The restricted codon set can in certain embodiments encode fewer than 19, 15, 10, 8, 6, or 4 amino acids, or encodes only 2 amino acids.

[0253] While the source antibodies disclosed herein include any one or more of the above referenced antibodies, the methods for diversification can be applied to other source antibodies whose sequence is known. A source antibody can be a naturally occurring antibody, synthetic antibody, recombinant antibody, humanized antibody, germ line derived antibody, chimeric antibody, affinity matured antibody, or antigen binding fragment thereof. The antibodies can be obtained from a variety of mammalian species including humans, mice and rats.

[0254] In some embodiments, a source antibody is an antibody that is obtained after one or more initial affinity screening rounds, but prior to an affinity maturation step(s). A source antibody may be selected or modified to provide for high yield and stability when produced in cell culture.

1. Generating Diversity in Junctional Region (JR's/VFRs)

[0255] High quality polypeptide libraries of antibody variable domains may be generated by diversifying a heavy chain variable framework residues corresponding to a junctional region as defined herein (JR_{N} or JR_{C}), and optionally one or more CDRs, of a source antibody or antibody fragment. Thus, each CDR includes or is connected to at least one JR, preferably two JR's, each JR comprising no more than 3 contiguous amino acids. The polypeptide libraries comprise a plurality of variant polypeptides comprising at least one CDR flanked by at least one of a JR_{N} and/or a JR_{C}, preferably each of a JR_{N} and a JR_{C}. Preferably, the JR and/or CDR is designed to provide for amino acid sequence diversity at certain positions while minimizing structural perturbations.

[0256] The diversity of the library or population of the antibody variable domains is designed to maximize diversity while minimizing structural perturbations of the antibody variable domain to provide for increased ability to isolate high affinity antibodies. The number of positions mutated in the antibody variable domain, e.g., JR_{N} and/or JR_{C} and/or CDR is minimized or specifically targeted. In some embodiments, structural amino acid positions may be identified and diversity may be minimized or maximized at those positions to ensure a well-folded polypeptide. Preferably, a single antibody or antigen binding polypeptide including at least one CDR and/or FW with at least one JR, is used as the source polypeptide.

[0257] The source polypeptide may be any antibody, antibody fragment, or antibody variable domain whether naturally occurring or synthetic. A polypeptide or source antibody variable domain can include an antibody, antibody variable domain, antigen binding fragment or polypeptide thereof, a monobody, VHH, a monobody or antibody variable domain obtained from a naive or synthetic library, naturally occurring antibody or monobody, synthetic antibody or monobody, recombinant antibody or monobody, humanized antibody or monobody, germline derived antibody or monobody, chimeric antibody or monabody, and affinity matured antibody or monabody.

[0258] Source antibody variable domains include but are not limited to antibody variable domains previously used to generate phage display libraries, such as VHH-RIG, VHH-VLK, VHH-LLR, and VHH-RLV (Bond et al., 2003, J. MA Biol., 332:643-655), and humanized antibodies or antibody fragments of known antibodies, eg. Her3, PCSK9 or any other polypeptide antigens disclosed herein. The sequences of many source antibody domains are know to those of skill in the art. In an embodiment, the library is generated using the heavy chain variable domain (VHH) of a monobody. The small size and simplicity make monobodies attractive scaffolds for peptidomimetic and small molecule design, as reagents for high throughput protein analysis, or as potential therapeutic agents. The diversified VHH domains are useful, inter alia, in the design of enzyme inhibitors, novel antigen binding molecules, modular binding units in bispecific or intracellular antibodies, as binding reagents in protein arrays, and as scaffolds for presenting constrained peptide libraries.

[0259] One criterion for generating diversity in the polypeptide library is selecting amino acid positions that may form an antigen binding pocket or groove in a single source antibody variable domain. One way of determining whether the amino acid position is part of an antigen binding site is to examine the three dimensional structure of the antibody variable domain, for example, for solvent accessible positions. If such information is available, amino acid positions that are in proximity to the antigen can also be determined.

[0260] Another criterion for selecting positions to be mutated are those positions which show variability in amino acid sequence when the sequences of known and/or natural antibodies are compared. A highly diverse position refers to a position of an amino acid located in the variable regions of the light or heavy chains that have a number of different amino acids represented at the position when the amino acid sequences of known and/or natural antibodies/antigen binding fragments are compared. The highly diverse positions are either in the JR and/or in the CDR regions. The positions of CDRH3 are all considered highly diverse.

[0261] JR and CDR diversity need not be limited at structural amino acid positions. A structural amino acid position refers to an amino acid position in a JR or CDR of a polypeptide that contributes to the stability of the structure of the polypeptide such that the polypeptide retains at least one biological function such as specifically binding to a molecule such as an antigen, or preferably, specifically binds to a target molecule that binds to folded polypeptide and does not bind to unfolded polypeptide such as Protein A. Structural amino acid positions of a JR of CDR are identified as amino acid positions less tolerant to amino acid substitutions without affecting the structural stability of the polypeptide.

[0262] In some embodiments, a plurality of antibody variable domains is generated, wherein each antibody variable domain comprises a variant JR region alone or in addition to a variant CDR. As noted supra, JR comprises at least 1 amino acid or up to 3 amino acids located at the N- or C-terminal of each CDR. The number of substituted amino acids may be less than all 20 amino acids, preferably 1 to 6 different amino acids. In some embodiments, the amino acids substituted in a CDR loop may not include cysteine.

[0263] In one aspect of the invention, the highly diverse residues in at least one, two, three, four, five or all of CDRs selected from the group consisting of CDRL1, CDRL2, CDRL3, CDRH1, CDRH2, CDRH3, and mixtures thereof are mutated (i.e., randomized using restricted codon sets as described herein). In one aspect of the invention, the highly diverse framework residues in at least one, two, three, four, five or all of JR's and mixtures thereof are mutated (i.e., randomized or targeted). For example, a population of polypeptides may be generated by diversifying at least one framework residue in a JR—either at the C or N-terminal of a CDR and/or highly diverse residue in CDRL3 and CDRH3. Accordingly, the invention provides for a large number of novel antibody sequences formed by replacing at least one framework residue in at least one or more JR's and highly diverse position of at least one or more CDRs of the source antibody variable domain with variant amino acids encoded their respective codons.

[0264] As discussed above, the variant amino acids are encoded by restricted codon sets. A codon set is a set of different nucleotide triplet sequences which can be used to form a set of oligonucleotides used to encode the desired group of amino acids. A set of oligonucleotides can be synthesized, for example, by solid phase synthesis, containing sequences that represent all possible combinations of nucleotide triplets provided by the codon set and that will encode the desired group of amino acids. Synthesis of oligonucleotides with selected nucleotide “degeneracy” at certain positions is well known in that art. Such sets of nucleotides having certain codon sets can be synthesized using commercial nucleic acid synthesizers (available from, for example, Applied Biosystems, Foster City, Calif.), or can be obtained commercially (for example, from Life Technologies, Rockville, Md.). Therefore, a set of oligonucleotides synthesized having a particular codon set will typically include a plurality of oligonucleotides with different sequences, the differences established by the codon set within the overall sequence. Oligonucleotides, as used according to the invention, have sequences that allow for hybridization to a variable domain nucleic acid template and also can include restriction enzyme sites for cloning purposes.

[0265] Typically, when the variant JR is inserted into a source or wild type framework region, the variant VFR replaces all or a part of the source or wild type framework region which it replaces. The location of insertion of the JR can be determined by comparing the location of JR's in naturally occurring antibody variable domains.

[0266] It is contemplated that the sequence diversity of libraries created by introduction of variant amino acids in a particular CDR, for e.g., CDRH3, can be increased by combining the variant CDR with other CDRs comprising variations in other regions of the antibody, specifically in other CDRs of either the light or heavy chain variable sequences or a combination with a particular variant JR. It is contemplated that the nucleic acid sequences that encode members of this set can be further diversified by introduction of other variant amino acids in the CDRs of either the light or heavy chain sequences, via codon sets or in the JR's. Thus, for example, in an exemplary embodiment, CDRH3 sequences from fusion polypeptides that bind a target antigen can be combined with diversified CDRL3, CDRH1, or CDRH2 sequences or variant JR from either chain, or any combination of diversified CDRs or JR's.

[0267] In another embodiment, JR diversity is generated using the degenerate codon sets. However, there can be individual preferences for one codon set or the other, depending on the various factors known in the art, such as efficiency of coupling in oligonucleotide synthesis chemistry.

[0268] In some embodiments, the practitioner of methods of the invention may wish to modify the amount/proportions of individual nucleotides (G, A, T, C) for a codon set.

[0269] Oligonucleotide or primer sets can be synthesized using standard methods. A set of oligonucleotides can be synthesized, for example, by solid phase synthesis, containing sequences that represent all possible combinations of nucleotide triplets provided by the restricted codon set and that will encode the desired restricted group of amino acids. Synthesis of oligonucleotides with selected nucleotide “degeneracy” at certain positions is well known in that art. Such sets of oligonucleotides having certain codon sets can be synthesized using commercial nucleic acid synthesizers (available from, for example, Applied Biosystems, Foster City, Calif.), or can be obtained commercially (for example, from Life Technologies, Rockville, Md.). Therefore, a set of oligonucleotides synthesized having a particular codon set will typically include a plurality of oligonucleotides with different sequences, the differences established by the codon set within the overall sequence. Oligonucleotides, as used according to the invention, have sequences that allow for hybridization to a CDR (for e.g., as contained within a variable domain) nucleic acid template and also can include restriction enzyme sites for cloning purposes.

[0270] In one method, nucleic acid sequences encoding variant amino acids can be created by oligonucleotide-mediated mutagenesis of a nucleic acid sequence encoding a source or template polypeptide such as the antibody variable domain of 4D5. This technique is well known in the art as described by Zoller et al. Nucleic Acids Res. 10:6487-6504 (1987). Briefly, nucleic acid sequences encoding variant amino acids are created by hybridizing an oligonucleotide set encoding the desired restricted codon sets to a DNA template, where the template is the single-stranded form of the plasmid containing a variable region nucleic acid template sequence. After hybridization, DNA polymerase is used to synthesize an entire second complementary strand of the template that will thus incorporate the oligonucleotide primer, and will contain the restricted codon sets as provided by the oligonucleotide set. Nucleic acids encoding other source or template molecules are known or can be readily determined.

[0271] Generally, oligonucleotides of at least 25 nucleotides in length are used. An optimal oligonucleotide will have at least 12 to 15 nucleotides that are completely complementary to the template on either side of the nucleotide(s) coding for the mutation(s). This ensures that the oligonucleotide will hybridize properly to the single-stranded DNA template molecule. The oligonucleotides are readily synthesized using techniques known in the art such as that described by Crea et al., Proc. Natl. Acad. Sei. USA, 75:5765 (1978).

[0272] The DNA template is generated by those vectors that are either derived from bacteriophage M13 vectors (the commercially available M13 mp18 and M13 mp19 vectors are suitable), or those vectors that contain a single-stranded phage origin of replication as described by Viera et al., Meth. Enzymol., 153:3 (1987). Thus, the DNA that is to be mutated can be inserted into one of these vectors in order to generate single-stranded template. Production of the single-stranded template is described in sections 4.21-4.41 of Sambrook et al., above.

[0273] To alter the native DNA sequence, the oligonucleotide is hybridized to the single stranded template under suitable hybridization conditions. A DNA polymerizing enzyme, usually T7 DNA polymerase or the Klenow fragment of DNA polymerase I, is then added to synthesize the complementary strand of the template using the oligonucleotide as a primer for synthesis. A heteroduplex molecule is thus formed such that one strand of DNA encodes the mutated form of gene 1, and the other strand (the original template) encodes the native, unaltered sequence of gene 1. This heteroduplex molecule is then transformed into a suitable host cell, usually a prokaryote such as E. coli JM101. After growing the cells, they are plated onto agarose plates and screened using the oligonucleotide primer radiolabelled with a 32-Phosphate to identify the bacterial colonies that contain the mutated DNA.

[0274] The method described immediately above may be modified such that a homoduplex molecule is created wherein both strands of the plasmid contain the mutation(s).

[0275] The modifications are as follows: The single stranded oligonucleotide is annealed to the single-stranded template as described above. A mixture of three deoxyribonucleotides, deoxyriboadenosine (dATP), deoxyriboguanosine (dGTP), and deoxyribothymidine (dTT), is combined with a modified thiodeoxyribocytosine called dCTP-(aS) (which can be obtained from Amersham). This mixture is added to the template-oligonucleotide complex. Upon addition of DNA polymerase to this mixture, a strand of DNA identical to the template except for the mutated bases is generated. In addition, this new strand of DNA will contain dCTP-(aS) instead of dCTP, which serves to protect it from restriction endonuclease digestion. After the template strand of the double-stranded heteroduplex is nicked with an appropriate restriction enzyme, the template strand can be digested with ExoIII nuclease or another appropriate nuclease past the region that contains the site(s) to be mutagenized. The reaction is then stopped to leave a molecule that is only partially single-stranded. A complete double-stranded DNA homoduplex is then formed using DNA polymerase in the presence of all four deoxyribonucleotide triphosphates, ATP, and DNA ligase. This homoduplex molecule can then be transformed into a suitable host cell.

[0276] As indicated previously the sequence of the oligonucleotide set is of sufficient length to hybridize to the template nucleic acid and may also, but does not necessarily, contain restriction sites. The DNA template can be generated by those vectors that are either derived from bacteriophage M13 vectors or vectors that contain a single-stranded phage origin of replication as described by Viera et al. ((1987) Meth. Enzymol., 153:3). Thus, the DNA that is to be mutated must be inserted into one of these vectors in order to generate single-stranded template. Production of the single-stranded template is described in sections 4.21-4.41 of Sambrook et al., supra.

[0277] According to another method, a library can be generated by providing upstream and downstream oligonucleotide sets, each set having a plurality of oligonucleotides with different sequences, the different sequences established by the codon sets provided within the sequence of the oligonucleotides. The upstream and downstream oligonucleotide sets, along with a variable domain template nucleic acid sequence, can be used in a polymerase chain reaction to generate a “library” of PCR products. The PCR products can be referred to as “nucleic acid cassettes”, as they can be fused with other related or unrelated nucleic acid sequences, for example, viral coat protein components and dimerization domains, using established molecular biology techniques.

[0278] The sequence of the PCR primers includes one or more of the designed codon sets for the JR's and highly diverse positions in a CDR region. As described above, a codon set is a set of different nucleotide triplet sequences used to encode desired variant amino acids.

[0279] Oligonucleotide sets can be used in a polymerase chain reaction using a variable region nucleic acid template sequence as the template to create nucleic acid cassettes. The variable region nucleic acid template sequence can be any portion of the light or heavy immunoglobulin chains containing the target nucleic acid sequences (ie., nucleic acid sequences encoding amino acids targeted for substitution). The variable region nucleic acid template sequence is a portion of a double stranded DNA molecule having a first nucleic acid strand and complementary second nucleic acid strand. The variable region nucleic acid template sequence contains at least a portion of a variable domain e.g., JR regions and has at least one CDR. In some cases, the variable region nucleic acid template sequence contains more than one JR and CDR. An upstream portion and a downstream portion of the variable region nucleic acid template sequence can be targeted for hybridization with members of an upstream oligonucleotide set and a downstream oligonucleotide set.

[0280] A first oligonucleotide of the upstream primer set can hybridize to the first nucleic acid strand and a second oligonucleotide of the downstream primer set can hybridize to the second nucleic acid strand. The oligonucleotide primers can include one or more codon sets and be designed to hybridize to a portion of the variable region nucleic acid template sequence. Use of these oligonucleotides can introduce two or more codon sets into the PCR product (ie., the nucleic acid cassette) following PCR. The oligonucleotide primer that hybridizes to regions of the nucleic acid sequence encoding the antibody variable domain includes portions that encode CDR residues that are targeted for amino acid substitution.

[0281] The upstream and downstream oligonucleotide sets can also be synthesized to include restriction sites within the oligonucleotide sequence. These restriction sites can facilitate the insertion of the nucleic acid cassettes [ie., PCR reaction products] into an expression vector having additional antibody sequences. Preferably, the restriction sites are designed to facilitate the cloning of the nucleic acid cassettes without introducing extraneous nucleic acid sequences or removing original CDR or framework nucleic acid sequences.

[0282] Nucleic acid cassettes can be cloned into any suitable vector for expression of a portion or the entire light or heavy chain sequence containing the targeted amino acid substitutions generated. According to methods detailed in the invention, the nucleic acid cassette is cloned into a vector allowing production of a portion or the entire light or heavy chain sequence fused to all or a portion of a viral coat protein (ie., creating a fusion protein) and displayed on the surface of a particle or cell. While several types of vectors are available and may be used to practice this invention, phagemid vectors are the preferred vectors for use herein, as they may be constructed with relative ease, and can be readily amplified. Phagemid vectors generally contain a variety of components including promoters, signal sequences, phenotypic selection genes, origin of replication sites, and other necessary components as are known to those of ordinary skill in the art.

[0283] In another embodiment, wherein a particular variant amino acid combination is to be expressed, the nucleic acid cassette contains a sequence that is able to encode all or a portion of the heavy or light chain variable domain, and is able to encode the variant amino acid combinations. For production of antibodies containing these variant amino acids or combinations of variant amino acids, as in a library, the nucleic acid cassettes can be inserted into an expression vector containing additional antibody sequence, for example all or portions of the variable or constant domains of the light and heavy chain variable regions. These additional antibody sequences can also be fused to other nucleic acid sequences, such as sequences which encode viral coat protein components and therefore allow production of a fusion protein.

[0284] Once the libraries with diversified JR regions are prepared they can be selected and/or screened for binding to one or more target antigens. In addition, the libraries may be selected for improved binding affinity to particular target antigen. The target antigens may be any type of antigenic molecule but preferably are a therapeutic target molecule.

[0285] The libraries of the invention may be generated by mutating the amino acids that comprise at least one JR, and optionally one or more CDRs. Thus, a library of antibody variable domains can be generated, for example, having mutations in the at least one or more JR's on one of the heavy or light chains, and optionally, CDRH1, CDRH2, and/or CDRH3. Another library can be generated having mutations in CDRL1, CDRL2 and CDRL3 in addition to or alternative to a mutation in an attendant JR. These libraries can also be used in conjunction with each other to generate binders of desired affinities. For example, after one or more rounds of selection of heavy chain libraries for binding to a target antigen, a light chain library can be replaced into the population of heavy chain binders for further rounds of selection to increase the affinity of the binders.

[0286] Another aspect of the invention includes compositions of the polypeptides, fusion proteins or libraries of the invention. Compositions comprise a polypeptide, a fusion protein, or a population of polypeptides or fusion proteins in combination with a physiologically acceptable carrier.

### 2. Variant VFRs

[0287] As discussed above, randomized or targeted JR or CDR variants can generate polypeptide libraries that bind to a variety of target molecules, including antigens. These variant CDRs or JR's can be incorporated into other antibody molecules or used to form a single chain mini-antibody with an antigen binding domain comprising a heavy chain variable domain but lacking a light chain.

[0288] Polypeptides comprising a variant JR having such a structure include VHH, antibody or monobody variable domain obtained from a naive or synthetic library, naturally occurring antibody or monobody, recombinant antibody or monobody, humanized antibody or monobody, germline derived antibody or monobody, chimeric antibody or monobody, and affinity matured antibody or monobody.

[0289] A number of different combinations of amino acid positions structural and/or nonstructural amino acid positions can be designed in a JR template. In general, the amino acids to the left of the central portion of contiguous amino acids (CDR) are referred to as the N terminal amino acids, and the amino acids to the right of the contiguous sequence (CDR) are referred to as C terminal amino acids. The amino acid positions at any one of the three positions within the JR can be any of the 20 naturally occurring amino acids, preferably L-amino acids. In some embodiments, the selected amino acids can be encoded by a nonrandom codon set that encodes six or less amino acids. The nonrandom codon set preferably encodes amino acids found or commonly occurring at those positions in randomly generated and/or naturally occurring antibodies.

### 3. Diversity in CDR Regions

[0290] The diversity of the library or population of the antibody variable domains is designed to maximize diversity while minimizing structural perturbations of the antibody variable domain to provide for increased ability to isolate high affinity antibodies. The number of positions mutated in the antibody variable domain is minimized or specifically targeted. In some embodiments, structural amino acid positions are identified and diversity is minimized at those positions to ensure a well-folded polypeptide. The positions mutated or changed include positions in FR and/or one or more of the CDR regions and combinations thereof.

[0291] The source polypeptide may be any antibody, antibody fragment, or antibody variable domain whether naturally occurring or synthetic. A polypeptide or source antibody variable domain can include an antibody, antibody variable domain, antigen binding fragment or polypeptide thereof, a monobody, VHH, a monobody or antibody variable domain obtained from a nave or synthetic library, naturally occurring antibody or monobody, synthetic antibody or monobody, recombinant antibody or monobody, humanized antibody or monobody, germline derived antibody or monobody, chimeric antibody or monobody, and affinity matured antibody or monobody. Representative sources opf polypepetides include her3, PCSK9, IL-13 (R), EphA2, antigen E or TrkA. Of course, any other polypeptide may be used as the source.

[0292] Source antibody variable domains include but are not limited to antibody variable domains previously used to generate phage display libraries, such as VHH-RIG, VHH-VLK, VHH-LLR, and VHH-RLV (Bond et al., 2003, 3. Mol. Biol., 332:643-655), and humanized antibodies or antibody fragments, such as mAbs 4D5, 2C4, and A.sub.4.6.1. In an embodiment, the library is generated using the heavy chain variable domain (VHH) of a monobody. The small size and simplicity make monobodies attractive scaffolds for peptidomimetic and small molecule design, as reagents for high throughput protein analysis, or as potential therapeutic agents. The diversified VHH domains are useful, inter alia, in the design of enzyme inhibitors, novel antigen binding molecules, modular binding units in bispecific or intracellular antibodies, as binding reagents in protein arrays, and as scaffolds for presenting constrained peptide libraries.

[0293] One criterion for generating diversity in the polypeptide library is selecting amino acid positions that form an antigen binding pocket or groove in a single source antibody variable domain whether or not the residues actually contact the antigen. In some embodiments, the amino acids position may form all or part of a loop. One way of determining whether the amino acid position is part of a loop in an antigen binding site is to examine the three dimensional structure of the antibody variable domain, for example, for solvent accessible residues. If available, amino acids positions in proximity to antigen can also be selected. Three dimensional structure information of antibody variable domains are available for many antibodies or can be prepared using available molecular modeling programs. Solvent accessible amino acid positions can be found in FR and CDRs, and typically form loops on the exterior of the protein. Preferably, solvent accessible positions are determined using coordinates from a 3-dimensional model of an antibody, using a computer program such as the InsightI1 program (Accelrys, San Diego, Calif.). Solvent accessible positions can also be determined using algorithms known in the art (e.g., Lee and Richards, J. Mol. Biol. 55, 379 (1971) and Connolly, J, Appl. Cryst. 16, 548 (1983)). Determination of solvent accessible positions can be performed using software suitable for protein modeling and 3-dimensional structural information obtained from an antibody. Software that can be utilized for these purposes includes SYBYL Biopolymer Module software (Tripos Associates). Generally and preferably, where an algorithm (program) requires a user input size parameter, the “size” of a probe which is used in the calculation is set at about 1.4 Angstrom or smaller in radius. In addition, determination of solvent accessible regions and area methods using software for personal computers has been described by Pacios ((1994) “ARVOMOL/CONTOUR: molecular surface areas and volumes on Personal Computers”, Comput. Chem. 18(4): 377-386; and “Variations of Surface Areas and Volumes in Distinct Molecular Surfaces of Biomolecules.” J. Mol. Model. (1995), 1: 46-53). The location of amino acid positions involved in forming antigen binding pockets may vary in different antibody variable domains, but typically involve at least one or a portion of a CDR and/or a portion of the FR (JR) region.

[0294] Amino acid positions less tolerant to amino acid substitutions can be identified using a method such as alanine scanning mutagenesis or shotgun scanning as described in WO 01/44463 and analyzing the effect of loss of the wild type amino acid on structural stability at positions in the CDR. An amino acid position is important to maintaining the structure of the polypeptide if a wild type amino acid is replaced with a scanning amino acid in an amino acid position in a CDR and the resulting variant exhibits poor binding to a target molecule that binds to folded polypeptide. A structural amino acid position is, preferably, a position in which the ratio of sequences with the wild type amino acid at a position to sequences with the scanning amino acid at that position is at least about 3 to 1.5 to 1.8 to 1, or about 10 to 1 or greater.

[0295] Initially, a CDRH1 region can include amino acid positions as defined by Chothia including amino acid positions 26 to 32. Additional amino acid positions can also be randomized on either side of the amino acid positions in CDRH1 as defined by Chothia, typically 1 to 3 amino acids at the N and/or C terminal end. The N terminal flanking region, central portion, and C-terminal flanking region is determined by selecting the length of CDRH1, randomizing each position and identifying the structural amino acid positions at the N and C-terminal ends of the CDR to set the boundaries of the CDR. The length of the N and C terminal flanking sequences should be long enough to include at least one structural amino acid position in each flanking sequence. In some embodiments, the length of the N-terminal flanking region is at least about from 1 to 4 contiguous amino acids, the central portion of one or more nonstructural positions can vary about 1 to 20 contiguous amino acids, and the C-terminal portion is at least about from 1 to 6 contiguous amino acids. In some embodiments, the central portion of contiguous amino acids can comprise, consist essentially of or consist of about 9 to 17 amino acids, about 9 to about 15 amino acids, and more preferably about 9 to 12 amino acids. The structural amino acid positions are less diversified than the central portion of the CDRH1 which can be completely randomized if desired. At the structural amino acid positions, up to six, and preferably no more than six different amino acids are substituted, more preferably about 1 to 6 different amino acids, more preferably about 1 to 5 different amino acids, more preferably about 1 to 4 different amino acids, more preferably about 1-3 different amino acids, and most preferably about 1-2 different amino acids. In some embodiments, the structural amino acid position is substituted with one or more hydrophobic amino acids and is encoded by a nonrandom codon set encoding six or less amino acids.

[0296] In another embodiment, CDR diversity is generated using any one of the codon sets described herein that encode the same amino acid group. However, there can be individual preferences for one codon set or the other, depending on the various factors known in the art, such as efficiency of coupling in oligonucleotide synthesis chemistry.

[0297] In some embodiments, the practitioner of methods of the invention may wish to modify the amount/proportions of individual nucleotides (G, A, T, C) for a codon set, such as the N nucleotide in a codon set such as in NNS. This is illustratively represented as XYZ codons. This can be achieved by, for example, doping different amounts of the nucleotides within a codon set instead of using a straight, equal proportion of the nucleotides for the N in the codon set. Such modifications can be useful for various purposes depending on the circumstances and desire of the practitioner. For example, such modifications can be made to more closely reflect the amino acid bias as seen in a natural diversity profile, such as the profile of CDR. Once the libraries with diversified CDR regions are prepared they can be selected and/or screened for binding one or more target antigens. In addition, the libraries may be selected for improved binding affinity to particular target antigen. The target antigens may include any type of antigenic molecule but preferably is antibody to therapeutic target molecule. The target antigen can also include a molecule that preferentially binds to folded antibody variable domains and does not bind as well as to unfolded antibody variable domains.

[0298] Antibody variable domains with targeted diversity in one or more CDRs can be combined with targeted diversity in a JR region as well. Combination of regions may be diversified in order to provide for high affinity antigen binding molecules or to improve the affinity of a known antibody such as a humanized antibody.

### 4. Fusion Polypeptides

[0299] Fusion polypeptide constructs can be prepared for generating fusion polypeptides that bind with significant affinity to potential ligands.

[0300] In particular, fusion polypeptides comprising diversified JR and/or CDR(s) and a heterologous polypeptide sequence (preferably that of at least a portion of a viral polypeptide) are generated, individually and as a plurality of unique individual polypeptides that are candidate binders to targets of interest. Compositions (such as libraries) comprising such polypeptides find use in a variety of applications, in particular as large and diverse pools of candidate immunoglobulin polypeptides (in particular, antibodies and antibody fragments) that bind to targets of interest.

[0301] In some embodiments, a fusion protein comprises an antibody variable domain, or an antibody variable domain and a constant domain, fused to all or a portion of a viral coat protein. Examples of viral coat proteins include infectivity protein PIII, major coat protein PVIII, p3, Sac, Hoc, gpD (of bacteriophage lambda), minor bacteriophage coat protein 6 (pVI) (filamentous phage; J Immunol Methods. 1999 Dec. 10; 231(1-2):39-51), variants of the M13 bacteriophage major coat protein (P8) (Protein Sci 2000 April; 9(4):647-54). The fusion protein can be displayed on the surface of a phage and suitable phage systems include M13KO7 helper phage, M13R408, M13-VCS, and Phi X 174, pJuFo phage system (J. Virol. 2001 August; 75(15):7107-13.v), hyperphage (Nat. Biotechnol. 2001 January; 19(1):75-8). The preferred helper phage is M13KO7, and the preferred coat protein is the M13 Phage gene III coat protein.

[0302] Tags useful for detection of antigen binding can also be fused to either an antibody variable domain not fused to a viral coat protein or an antibody variable domain fused to a viral coat protein. Additional peptides that can be fused to antibody variable domains include gD tags, c-Myc epitopes, poly-histidine tags, fluorescence proteins (e.g., GFP), or .beta.-galactosidase protein which can be useful for detection or purification of the fusion protein expressed on the surface of the phage or cell.

[0303] These constructs may also comprise a dimerizable sequence that when present as a dimerization domain in a fusion polypeptide provides for increased tendency for heavy chains to dimerize to form dimers of Fab or Fab′ antibody fragments/portions. These dimerization sequences may be in addition to any heavy chain hinge sequence that may be present in the fusion polypeptide. Dimerization domains in fusion phage polypeptides bring two sets of fusion polypeptides (LC/HC-phage protein/fragment (such as pill)) together, thus allowing formation of suitable linkages (such as interheavy chain disulfide bridges) between the two sets of fusion polypeptide. Vector constructs containing such dimerization sequences can be used to achieve divalent display of antibody variable domains, for example the diversified fusion proteins described herein, on phage. Preferably, the intrinsic affinity of each monomeric antibody fragment (fusion polypeptide) is not significantly altered by fusion to the dimerization sequence. Preferably, dimerization results in divalent phage display which provides increased avidity of phage binding, with significant decrease in off-rate, which can be determined by methods known in the art and as described herein. Dimerization sequence-containing vectors of the invention may or may not also include an amber stop codon 5′ of the dimerization sequence. Dimerization sequences are known in the art, and include, for example, the GCN4 zipper sequence (GRMKQLEDKVEELLSKNYHLENEVARLKKLVGERG).

### Generation of Libraries Comprising Variant CDR-Containing Polypeptides

[0304] Libraries of variant CDR polypeptides can be generated by mutating the framework residues in a JR and/or highly diverse positions in at least one CDR of an antibody variable domain. Some or all of the CDRs can be mutated using the methods of the invention. In some embodiments, it may be preferable to generate diverse antibody libraries by mutating positions in CDRH1, CDRH2 and CDRH3 to form a single library or by mutating positions in CDRL3 and CDRH3 to form a single library or by mutating positions in CDRL3 and CDRH1, CDRH2 and CDRH3 to form a single library.

[0305] A library of antibody variable domains can be generated, for example, having mutations in at least one JR and/or highly diverse positions of CDRH1, CDRH2 and CDRH3. Another library can be generated having mutations in CDRL1, CDRL2 and CDRL3. These libraries can also be used in conjunction with each other to generate binders of desired affinities. For example, after one or more rounds of selection of heavy chain libraries for binding to a target antigen, a light chain library can be replaced into the population of heavy chain binders for further rounds of selection to increase the affinity of the binders.

[0306] In one embodiment, a library is created by substitution of original amino acids with a limited set of variant amino acids in the CDRH1, CDRH2, and/or CDRH3 region of the variable region of the heavy chain sequence and/or the CDRL3 region of the variable region of the light chain sequence or in at least JR on either the heavy or light chain. According to the invention, this library can contain a plurality of antibody sequences, wherein the sequence diversity is primarily in the CDRH3 region of the heavy chain sequence.

[0307] Multiple libraries can be pooled and sorted using solid support selection and solution sorting methods as described herein. Multiple sorting strategies may be employed. For example, one variation involves sorting on target bound to a solid, followed by sorting for a tag that may be present on the fusion polypeptide (e.g. anti-gD tag) and followed by another sort on target bound to solid. Alternatively, the libraries can be sorted first on target bound to a solid surface, the eluted binders are then sorted using solution phase binding with decreasing concentrations of target antigen. Utilizing combinations of different sorting methods provides for minimization of selection of only highly expressed sequences and provides for selection of a number of different high affinity clones.

[0308] High affinity binders isolated from the libraries of these embodiments are readily produced in bacterial and eukaryotic cell culture in high yield. The vectors can be designed to readily remove sequences such as gD tags, viral coat protein component sequence, and/or to add in constant region sequences to provide for production of full length antibodies or antigen binding fragments in high yield. Any combination of codon sets and CDRs can be diversified according to methods of the invention.

### 6. Polynucleotides, Vectors, Host Cells, and Recombinant Methods

### Vectors

[0309] One aspect of the invention includes a replicable expression vector comprising a nucleic acid sequence encoding a gene fusion, wherein the gene fusion encodes a fusion protein comprising a CDR-containing polypeptide (such as an antibody variable domain), or an antibody variable domain and a constant domain, fused to all or a portion of a viral coat protein. Also included is a library of diverse replicable expression vectors comprising a plurality of gene fusions encoding a plurality of different fusion proteins including a plurality of the fusion polypeptides generated with diverse sequences as described above. The vectors can include a variety of components and may be constructed to allow for movement of antibody variable domain between different vectors and/or to provide for display of the fusion proteins in different formats.

[0310] Examples of vectors include phage vectors and phagemid vectors. A phage vector generally has a phage origin of replication allowing phage replication and phage particle formation. The phage is generally a filamentous bacteriophage, such as an M13, fl, fd, Pf3 phage or a derivative thereof, or a lambdoid phage, such as lambda, 21, phi80, phi81, 82, 424, 434, etc., or a derivative thereof.

[0311] Examples of viral coat proteins include infectivity protein P111 (sometimes also designated p3), major coat protein PVII1, Soc (T4), Hoc (T4), gpD (of bacteriophage lambda), minor bacteriophage coat protein 6 (pVI) (filamentous phage; Immunol Methods. 1999 Dee. 10; 231 (1-2):39-51), variants of the M13 bacteriophage major coat protein (P8) (Protein Sci 2000 April; 9(4):647-54). The fusion protein can be displayed on the surface of a phage and suitable phage systems include M13KO7 helper phage, M13R408, M13-VCS, and Phi X 174, pJuFo phage system (J. Virol. 2001 August; 75(15):7107-13.v), hyperphage (Nat. Biotechnol. 2001 January; 19(1):75-8). In certain embodiments, the helper phage is M13KO7, and the coat protein is the M13 Phage gene III coat protein. In certain embodiments, the host is E. coli, and protease deficient strains of E. coli. Vectors, such as the fth 1 vector (Nucleic Acids Res. 2001 May 15; 29(10):E50-0) can be useful for the expression of the fusion protein.

[0312] The expression vector also can have a secretory signal sequence fused to the DNA encoding a CDR-containing fusion polypeptide (e.g., each subunit of an antibody, or fragment thereof). This sequence is typically located immediately 5′ to the gene encoding the fusion protein, and will thus be transcribed at the amino terminus of the fusion protein. However, in certain cases, the signal sequence has been demonstrated to be located at positions other than 5′ to the gene encoding the protein to be secreted. This sequence targets the protein to which it is attached across the inner membrane of the bacterial cell. The DNA encoding the signal sequence may be obtained as a restriction endonuclease fragment from any gene encoding a protein that has a signal sequence. Suitable prokaryotic signal sequences may be obtained from genes encoding, for example, LamB or OmpF (Wong et al., Gene, 68:1931 (1983), MalE, PhoA and other genes. In one embodiment, a prokaryotic signal sequence for practicing this invention is the E. coli heat-stable enterotoxin II (STII) signal sequence as described by Chang et al., Gene 55:189 (1987), and/or malE.

[0313] As indicated above, a vector also typically includes a promoter to drive expression of the fusion polypeptide. Promoters most commonly used in prokaryotic vectors include the lac Z promoter system, the alkaline phosphatase pho A promoter (Ap), the bacteriophage I.sub.PL promoter (a temperature sensitive promoter), the tac promoter (a hybrid trp-lac promoter that is regulated by the lac repressor), the tryptophan promoter, and the bacteriophage T7 promoter. For general descriptions of promoters, see section 17 of Sambrook et al. supra. While these are the most commonly used promoters, other suitable promoters may be used as well.

[0314] The vector can also include other nucleic acid sequences, for example, sequences encoding gD tags, c-Myc epitopes, poly-histidine tags, fluorescence proteins (e.g., GFP), or beta-galactosidase protein which can be useful for detection or purification of the fusion protein expressed on the surface of the phage or cell. Nucleic acid sequences encoding, for example, a gD tag, also provide for positive or negative selection of cells or virus expressing the fusion protein. In some embodiments, the gD tag is fused to an antibody variable domain which is not fused to the viral coat protein component. Nucleic acid sequences encoding, for example, a polyhistidine tag, are useful for identifying fusion proteins including antibody variable domains that bind to a specific antigen using immunohistochemistry. Tags useful for detection of antigen binding can be fused to either an antibody variable domain not fused to a viral coat protein component or an antibody variable domain fused to a viral coat protein component.

[0315] Another useful component of the vectors used to practice this invention is phenotypic selection genes. Typical phenotypic selection genes are those encoding proteins that confer antibiotic resistance upon the host cell. By way of illustration, the ampicillin resistance gene (amp), and the tetracycline resistance gene (tetr) are readily employed for this purpose.

[0316] The vector can also include nucleic acid sequences containing unique restriction sites and suppressible stop codons. The unique restriction sites are useful for moving antibody variable domains between different vectors and expression systems, especially useful for production of full-length antibodies or antigen binding fragments in cell cultures. The suppressible stop codons are useful to control the level of expression of the fusion protein and to facilitate purification of soluble antibody fragments. For example, an amber stop codon can be read as Gln in a supE host to enable phage display, while in a non-supE host it is read as a stop codon to produce soluble antibody fragments without fusion to phage coat proteins. These synthetic sequences can be fused to one or more antibody variable domains in the vector.

[0317] It is sometimes beneficial to use vector systems that allow the nucleic acid encoding an antibody sequence of interest, for example a CDR having variant amino acids, to be easily removed from the vector system and placed into another vector system. For example, appropriate restriction sites can be engineered in a vector system to facilitate the removal of the nucleic acid sequence encoding an antibody or antibody variable domain having variant amino acids. The restriction sequences are usually chosen to be unique in the vectors to facilitate efficient excision and ligation into new vectors. Antibodies or antibody variable domains can then be expressed from vectors without extraneous fusion sequences, such as viral coat proteins or other sequence tags.

[0318] Between nucleic acid encoding antibody variable or constant domain (gene I) and the viral coat protein component (gene 2), DNA encoding a termination or stop codon may be inserted, such termination codons including UAG (amber), UAA (ocher) and UGA (ope1). (Microbiology, Davis et al., Harper & Row, New York, 1980, pp. 237, 245-47 and 374). The termination or stop codon expressed in a wild type host cell results in the synthesis of the gene protein product without the gene 2 protein attached. However, growth in a suppressor host cell results in the synthesis of detectable quantities of fused protein. Such suppressor host cells are well known and described, such as E. coli suppressor strain (Bullock et al., BioTechniques 5:376-379 (1987)). Any acceptable method may be used to place such a termination codon into the mRNA encoding the fusion polypeptide.

[0319] The suppressible codon may be inserted between the first gene encoding an antibody variable or constant domain, and a second gene encoding at least a portion of a phage coat protein. Alternatively, the suppressible termination codon may be inserted adjacent to the fusion site by replacing the last amino acid triplet in the antibody variable domain or the first amino acid in the phage coat protein. The suppressible termination codon may be located at or after the C-terminal end of a dimerization domain. When the plasmid containing the suppressible codon is grown in a suppressor host cell, it results in the detectable production of a fusion polypeptide containing the polypeptide and the coat protein. When the plasmid is grown in a non-suppressor host cell, the antibody variable domain is synthesized substantially without fusion to the phage coat protein due to termination at the inserted suppressible triplet UAG, UAA, or UGA. In the non-suppressor cell the antibody variable domain is synthesized and secreted from the host cell due to the absence of the fused phage coat protein which otherwise anchored it to the host membrane.

[0320] In some embodiments, the CDR or JR being diversified (randomized or targeted approach) may have a stop codon engineered in the template sequence (referred to herein as a “stop template”). This feature provides for detection and selection of successfully diversified sequences based on successful repair of the stop codon(s) in the template sequence due to incorporation of the oligonucleotide(s) comprising the sequence(s) for the variant amino acids of interest.

[0321] The light and/or heavy chain antibody variable or constant domains can also be fused to an additional peptide sequence, the additional peptide sequence providing for the interaction of one or more fusion polypeptides on the surface of the viral particle or cell. These peptide sequences are herein referred to as “dimerization domains”. Dimerization domains may comprise at least one or more of a dimerization sequence, or at least one sequence comprising a cysteine residue or both. Suitable dimerization sequences include those of proteins having amphipathic alpha helices in which hydrophobic residues are regularly spaced and allow the formation of a dimer by interaction of the hydrophobic residues of each protein; such proteins and portions of proteins include, for example, leucine zipper regions. Dimerization domains can also comprise one or more cysteine residues (e.g. as provided by inclusion of an antibody hinge sequence within the dimerization domain). The cysteine residues can provide for dimerization by formation of one or more disulfide bonds. In one embodiment, wherein a stop codon is present after the dimerization domain, the dimerization domain comprises at least one cysteine residue. In some embodiments, the dimerization domains are located between the antibody variable or constant domain and the viral coat protein component.

[0322] In some cases the vector encodes a single antibody-phage polypeptide in a single chain form containing, for example, both the heavy and light chain variable regions fused to a coat protein. In these cases the vector is considered to be “monocistronic”, expressing one transcript under the control of a certain promoter. For example, a vector may utilize a promoter (such as the alkaline phosphatase (AP) or Tac promoter) to drive expression of a monocistronic sequence encoding VL and VH domains, with a linker peptide between the VL and VH domains. This cistronic sequence may be connected at the 5′ end to a signal sequence (such as an E. coli malE or heat-stable enterotoxin II (STII) signal sequence) and at its 3′ end to all or a portion of a viral coat protein (such as the bacteriophage pIII protein). The fusion polypeptide encoded by a vector of this embodiment is referred to herein as “ScFv-pIII”. In some embodiments, a vector may further comprise a sequence encoding a dimerization domain (such as a leucine zipper) at its 3′ end, between the second variable domain sequence (e.g., VH) and the viral coat protein sequence. Fusion polypeptides comprising the dimerization domain are capable of dimerizing to form a complex of two scFv polypeptides (referred to herein as “(ScFv).sub.2-pIII)”).

[0323] In other cases, the variable regions of the heavy and light chains can be expressed as separate polypeptides, the vector thus being “bicistronic”, allowing the expression of separate transcripts. In these vectors, a suitable promoter, such as the Ptac or PhoA promoter, is used to drive expression of a bicistronic message. A first cistron encoding, for example, a light chain variable and constant domain, may be connected at the 5′ end to a signal sequence, such as E. coli malE or heat-stable enterotoxin II (STII) signal sequence, and at the 3′ end to a nucleic acid sequence encoding a tag sequence, such as gD tag. A second cistron, encoding, for example, a heavy chain variable domain and constant domain CH1, is connected at its 5′ end to a signal sequence, such as E. coli malE or heat-stable enterotoxin II (STII) signal sequence, and at the 3′ end to all or a portion of a viral coat protein.

[0324] In one embodiment of a vector which provides a bicistronic message and for display of F(ab′).sub.2-pIII, a suitable promoter, such as Ptac or PhoA (AP) promoter, drives expression of a first cistron encoding a light chain variable and constant domain operably linked at 5′ end to a signal sequence such as the E. coli malE or heat stable enterotoxin II (STII) signal sequence, and at the 3′ end to a nucleic acid sequence encoding a tag sequence such as gD tag. The second cistron encodes, for example, a heavy chain variable and constant domain operatively linked at 5′ end to a signal sequence such as E. coli malE or heat stable enterotoxin II (STII) signal sequence, and at 3′ end has a dimerization domain comprising IgG hinge sequence and a leucine zipper sequence followed by at least a portion of viral coat protein.

Introduction of Vectors into Host Cells

[0325] Vectors constructed as described in accordance with the invention are introduced into a host cell for amplification and/or expression. Vectors can be introduced into host cells using standard transformation methods including electroporation, calcium phosphate precipitation and the like. If the vector is an infectious particle such as a virus, the vector itself provides for entry into the host cell. Transfection of host cells containing a replicable expression vector which encodes the gene fusion and production of phage particles according to standard procedures provides phage particles in which the fusion protein is displayed on the surface of the phage particle.

[0326] Replicable expression vectors are introduced into host cells using a variety of methods. In one embodiment, vectors can be introduced into cells using electroporation as described in WO/00106717. Cells are grown in culture in standard culture broth, optionally for about 6-48 hours (or to OD.sub.600=0.6-0.8) at about 37.degree. C., and then the broth is centrifuged and the supernatant removed (e.g. decanted). In some embodiments, initial purification includes resuspending the cell pellet in a buffer solution (e.g. 1.0 mM HEPES pH 7.4) followed by recentrifugation and removal of supernatant. The resulting cell pellet is resuspended in dilute glycerol (e.g. 5-20% v/v) and again recentrifuged to form a cell pellet and the supernatant removed. The final cell concentration is obtained by resuspending the cell pellet in water or dilute glycerol to the desired concentration.

[0327] In certain embodiments, the recipient cell is the electroporation competent E. coli strain of the present invention, which is E. coli strain SS320 (Sidhu et al., Methods Enzymol. (2000), 328:333-363). Strain SS320 was prepared by mating MC1061 cells with XL1-BLUE cells under conditions sufficient to transfer the fertility episome (F′ plasmid) or XL1-BLUE into the MC1061 cells. Strain SS320 has been deposited with the American Type Culture Collection (ATCC), 10801 University Boulevard, Manassas, Va. USA, on Jun. 18, 1998 and assigned Deposit Accession No, 98795. Any F′ episome which enables phage replication in the strain may be used in the invention. Suitable episomes are available from strains deposited with ATCC or are commercially available (C.1236, CSH18, DHF′, JM101, JM103, JM105, JM107, JM109, JM110), KS1000, XL1-BLUE, 71-18 and others).

[0328] The use of higher DNA concentrations during electroporation (about 10.times.) increases the transformation efficiency and increases the amount of DNA transformed into the host cells. The use of high cell concentrations also increases the efficiency (about 10.times.). The larger amount of transferred DNA produces larger libraries having greater diversity and representing a greater number of unique members of a combinatorial library, Transformed cells are generally selected by growth on antibiotic containing medium.

### Selection (Sorting) and Screening for Binders to Targets of Choice

[0329] Use of phage display for identifying target antigen binders, with its various permutations and variations in methodology, are well established in the art. One approach involves constructing a family of variant replicable vectors containing a transcription regulatory element operably linked to a gene fusion encoding a fusion polypeptide, transforming suitable host cells, culturing the transformed cells to form phage particles which display the fusion polypeptide on the surface of the phage particle, followed by a process that entails selection or sorting by contacting the recombinant phage particles with a target antigen so that at least a portion of the population of particles bind to the target with the objective to increase and enrich the subsets of the particles which bind from particles relative to particles that do not bind in the process of selection. The selected pool can be amplified by infecting host cells, such as fresh XL1-Blue cells, for another round of sorting on the same target with different or same stringency. The resulting pool of variants are then screened against the target antigens to identify novel high affinity binding proteins. These novel high affinity binding proteins can be useful as therapeutic agents as antagonists or agonists, and/or as diagnostic and research reagents.

[0330] Fusion polypeptides such as antibody variable domains comprising the variant amino acids can be expressed on the surface of a phage, phagemid particle or a cell and then selected and/or screened for the ability of members of the group of fusion polypeptides to bind a target antigen which is typically an antigen of interest. The processes of selection for binders to target can also be include sorting on a generic protein having affinity for antibody variable domains such as protein L or a tag specific antibody which binds to antibody or antibody fragments displayed on phage, which can be used to enrich for library members that display correctly folded antibody fragments (fusion polypeptides).

[0331] Target proteins, such as for example her3 or PCSK9 may be isolated from natural sources or prepared by recombinant methods by procedures known in the art. Sequences of the various target polypepetidse again which variant antibodies made in accordance with the methods of the invention are known to a skilled artisan. Target antigens can include a number of molecules of therapeutic interest.

[0332] A variety of strategies of selection (sorting) for affinity can be used. One example is a solid-support method or plate sorting or immobilized target sorting. Another example is a solution-binding method.

[0333] For the solid support method, the target protein may be attached to a suitable solid or semi solid matrix. Such matrices are known in the art, such as agarose beads, acrylamide beads, glass beads, cellulose, various acrylic copolymers, hydroxyalkyl methacrylate gels, polyacrylic and polymethacrylic copolymers, nylon, neutral and ionic carriers, and the like. Attachment of the target protein to the matrix may be accomplished by methods described, e.g., in Methods in Enzymology, 44 (1976), or by other means known in the art. After attachment of the target antigen to the matrix, the immobilized target is contacted with the library expressing the fusion polypeptides under conditions suitable for binding of at least a subset of the phage particle population with the immobilized target antigen. Normally, the conditions, including pH, ionic strength, temperature and the like will mimic physiological conditions. Bound particles (“binders”) to the immobilized target are separated from those particles that do not bind to the target by washing. Wash conditions can be adjusted to result in removal of all but the high affinity binders. Binders may be dissociated from the immobilized target by a variety of methods. These methods include competitive dissociation using the wild-type ligand (e.g. excess target antigen), altering pH and/or ionic strength, and methods known in the art. Selection of binders typically involves elution from an affinity matrix with a suitable elution material such as acid like 0.1M HCl or ligand. Elution with increasing concentrations of ligand could elute displayed binding molecules of increasing affinity.

[0334] The binders can be isolated and then re-amplified in suitable host cells by infecting the cells with the viral particles that are binders (and helper phage if necessary, e.g., when the viral particle is a phagemid particle) and the host cells are cultured under conditions suitable for amplification of the particles that display the desired fusion polypeptide. The phage particles are then collected and the selection process is repeated one or more times until binders of the target antigen are enriched. Any number of rounds of selection or sorting can be utilized. One of the selection or sorting procedures can involve isolating binders that bind to a generic affinity protein such as protein L or an antibody to a polypeptide tag present in a displayed polypeptide such as antibody to the gD protein or polyhistidine tag. Counterselection may be included in one or more rounds of selection or sorting to isolate binders that also exhibit undesired binding to one or more non-target antigens.

[0335] One aspect of the invention involves selection against libraries of the invention using a novel selection method which is termed “solution-binding method”. The invention allows solution phase sorting with much improved efficiency over conventional solution sorting methods. The solution binding method may be used for finding original binders from a random library or finding improved binders from a library that was designated to improve affinity of a particular binding clone or group of clones. The method comprises contacting a plurality of polypeptides, such as those displayed on phage or phagemid particles (library), with a target antigen labeled or fused with a tag molecule. The tag could be biotin or other moieties for which specific binders are available. The stringency of the solution phase can be varied by using decreasing concentrations of labeled target antigen in the first solution binding phase. To further increase the stringency, the first solution binding phase can be followed by a second solution phase having high concentration of unlabelled target antigen after the initial binding with the labeled target in the first solution phase. Usually, 100 to 1000 fold of unlabelled target over labeled target is used in the second phase (if included). The length of time of incubation of the first solution phase can vary from a few minutes to one to two hours or longer to reach equilibrium. Using a shorter time for binding in this first phase may bias or select for binders that have fast on-rate. The length of time and temperature of incubation in second phase can be varied to increase the stringency. This provides for a selection bias for binders that have slow rate of coming off the target (off-rate). After contacting the plurality of polypeptides (displayed on the phage/phagemid particles) with a target antigen, the phage or phagemid particles that are bound to labeled targets are separated from phage that do not bind. The particle-target mixture from solution phase of binding is isolated by contacting it with the labeled target moiety and allowing for its binding to, a molecule that binds the labeled target moiety for a short period of time (e.g., 2-5 minutes). The initial concentration of the labeled target antigen can range from about 0.1 nM to about 1000 nM. The bound particles are eluted and can be propagated for next round of sorting. In certain embodiments, multiple rounds of sorting are performed using a lower concentration of labeled target antigen with each round of sorting.

[0336] For example, an initial sort or selection using about 100 to 250 nM labeled target antigen should be sufficient to capture a wide range of affinities, although this factor can be determined empirically and/or to suit the desire of the practitioner. In the second round of selection, about 25 to 100 nM of labeled target antigen may be used. In the third round of selection, about 0.1 to 25 nM of labeled target antigen may be used. For example, to improve the affinity of a 100 nM binder, it may be desirable to start with 20 nM and then progress to 5 and 1 nM labeled target, then, followed by even lower concentrations such as about 0.1 nM labeled target antigen.

[0337] The conventional solution sorting involves use of beads like streptavidin-coated beads, which is very cumbersome to use and often results in very low efficiency of phage binder recovery. The conventional solution sorting with beads takes much longer than 2-5 minutes and is less feasible to adapt to high throughput automation than the invention described above.

[0338] As described herein, combinations of solid support and solution sorting methods can be advantageously used to isolate binders having desired characteristics. After selection/sorting on target antigen for a few rounds, screening of individual clones from the selected pool generally is performed to identify specific binders with the desired properties/characteristics. In some embodiments, the process of screening is carried out by automated systems to allow for high-throughput screening of library candidates.

[0339] Two major screening methods are described below. However, other methods known in the art may also be used in the methods of the invention. The first screening method comprises a phage ELISA assay with immobilized target antigen, which provides for identification of a specific binding clone from a non-binding clone. Specificity can be determined by simultaneous assay of the clone on target coated well and BSA or other non-target protein coated wells. This assay is automatable for high throughput screening.

[0340] One embodiment provides a method of selecting for an antibody variable domain that binds to a specific target antigen from a library of antibody variable domain by generating a library of replicable expression vectors comprising a plurality of polypeptides; contacting the library with a target antigen and at least one nontarget antigen under conditions suitable for binding; separating the polypeptide binders in the library from the nonbinders; identifying the binders that bind to the target antigen and do not bind to the nontarget antigen; eluting the binders from the target antigen; and amplifying the replicable expression vectors comprising the polypeptide binder that bind to a specific antigen.

[0341] The second screening assay is an affinity screening assay that provides for screening for clones that have high affinity from clones that have low affinity in a high throughput manner. In the assay, each clone is assayed with and without first incubating with target antigen of certain concentration for a period of time (e.g., 30-60 minutes) before application to target coated wells briefly (e.g., 5-15 minutes). Then bound phage is measured by usual phage ELISA method, e.g. using anti-M13 HRP conjugates. The ratio of binding signal of the two wells, one well having been preincubated with target and the other well not preincubated with target antigen is an indication of affinity. The selection of the concentration of target for first incubation depends on the affinity range of interest. For example, if binders with affinity higher than 10 nM are desired, 100 nM of target in the first incubation is often used. Once binders are found from a particular round of sorting (selection), these clones can be screened with an affinity screening assay to identify binders with higher affinity. Combinations of any of the sorting/selection methods described above may be combined with the screening methods. For example, in one embodiment, polypeptide binders are first selected for binding to immobilized target antigen. Polypeptide binders that bind to the immobilized target antigen can then be amplified and screened for binding to the target antigen and for lack of binding to nontarget antigens. Polypeptide binders that bind specifically to the target antigen are amplified. These polypeptide binders can then selected for higher affinity by contact with a concentration of a labeled target antigen to form a complex, wherein the concentration ranges of labeled target antigen from about 0.1 nM to about 1000 nM, the complexes are isolated by contact with an agent that binds to the label on the target antigen. The polypeptide binders are then eluted from the labeled target antigen and optionally, the rounds of selection are repeated, each time a lower concentration of labeled target antigen is used. The high affinity polypeptide binders isolated using this selection method can then be screened for high affinity using a variety of methods known in the art, some of which are described herein. These methods can provide for finding clones with high affinity without having to perform long and complex competition affinity assays on a large number of clones. The intensive aspect of doing complex assays of many clones often is a significant obstacle to finding best clones from a selection. This method is especially useful in affinity improvement efforts where multiple binders with similar affinity can be recovered from the selection process. Different clones may have very different efficiency of expression/display on phage or phagemid particles. Those clones more highly expressed have better chances being recovered. That is, the selection can be biased by the display or expression level of the variants. The solution-binding sorting method of the invention can improve the selection process for finding binders with high affinity. This method is an affinity screening assay that provides a significant advantage in screening for the best binders quickly and easily.

[0342] The antibodies or antigen binding fragments can be further selected for functional activity, for example, antagonist or agonist activity. For example, anti-her3 antibodies can be selected for the ability to inhibit tyrosine phosphorylation of HER-2, dimerization with Her2, proliferation of cancer cells or to induce apoptosis of cancer cells. Assays for identifying and measuring these activities are known. See for example in WO98/17797.

[0343] After binders are identified by binding to the target antigen, and/or functional assays the nucleic acid can be extracted. Extracted DNA can then be used directly to transform E. coli host cells or alternatively, the encoding sequences can be amplified, for example using PCR with suitable primers, and sequenced by any typical sequencing method. Variable domain DNA of the binders can be restriction enzyme digested and then inserted into a vector for protein expression.

[0344] Populations comprising polypeptides having CDR(s) with restricted sequence diversity generated according to methods of the invention can be used to isolate binders against a variety of targets, including those listed in this application. These binders may comprise one or more variant CDRs comprising diverse sequences generated using restricted codons. In some embodiments, a variant CDR is CDRH3 comprising sequence diversity generated by amino acid substitution with restricted codon sets and/or amino acid insertions resulting from varying CDRH3 lengths. One or more variant CDRs may be combined. In some embodiments, only CDRH3 is diversified. In other embodiments, two or more heavy chain CDRs, including CDRH3, are variant. In other embodiments, one or more heavy chain CDRs, excluding CDRH3, are variant. In some embodiments, at least one heavy chain and at least one light chain CDR are variant. In some embodiments, at least one, two, three, four, five or all of CDRs H1, H2, H3, L1, L2 and L3 are variant.

[0345] In some cases, it can be beneficial to combine one or more diversified light chain CDRs with novel binders isolated from a population of polypeptides comprising one or more diversified heavy chain CDRs. This process may be referred to as a 2-step process. An example of a 2-step process comprises first determining binders (generally lower affinity binders) within one or more libraries generated by randomizing one or more CDRs, wherein the CDRs randomized in each library are different or, where the same CDR is randomized, it is randomized to generate different sequences. Binders from a heavy chain library can then be randomized with CDR diversity in a light chain CDRs by, for example, a mutagenesis technique such as that of Kunkel, or by cloning (cut-and-paste (e.g. by ligating different CDR sequences together)) the new light chain library into the existing heavy chain binders that has only a fixed light chain. The pool can then be further sorted against one or more targets to identify binders possessing increased affinity. For example, binders (for example, low affinity binders) obtained from sorting an H1/H2/H3 may be fused with library of an L1 L2/L3 diversity to replace its original fixed L1/L2/L3, wherein the new libraries are then further sorted against a target of interest to obtain another set of binders (for example, high affinity binders). Novel antibody sequences can be identified that display higher binding affinity to any of a variety of target antigens.

[0346] In some embodiments, libraries comprising polypeptides of the invention are subjected to a plurality of sorting rounds, wherein each sorting round comprises contacting the binders obtained from the previous round with a target antigen distinct from the target antigen(s) of the previous round(s). Preferably, but not necessarily, the target antigens are homologous in sequence, for example members of a family of related but distinct polypeptides, such as, but not limited to, cytokines (for example, alpha interferon subtypes).

### Activity Assays

[0347] The antibodies of the present invention can be characterized for their physical/chemical properties and biological functions by various assays known in the art. The purified immunoglobulins can be further characterized by a series of assays including, but not limited to, N-terminal sequencing, amino acid analysis, non-denaturing size exclusion high pressure liquid chromatography (HPLC), mass spectrometry, ion exchange chromatography and papain digestion.

[0348] In certain embodiments, the immunoglobulins produced herein are analyzed for their biological activity. In some embodiments, the immunoglobulins of the present invention are tested for their antigen binding activity. The antigen binding assays that are known in the art and can be used herein include without limitation any direct or competitive binding assays using techniques such as western blots, radioimmunoassays, ELISA (enzyme linked immunosorbent assay), “sandwich” immunoassays, immunoprecipitation assays, fluorescent immunoassays, and protein A immunoassays.

[0349] The antibodies or antigen binding fragments can be further selected for functional activity, for example, antagonist or agonist activity. For example, anti-HER-2 antibodies can be selected for the ability to inhibit tyrosine phosphorylation of HER-2, inhibit proliferation of cancer cells or to induce apoptosis of cancer cells. Assays for identifying and measuring these activities are described for example in WO98/17797.

[0350] In one embodiment, the present invention contemplates an altered antibody that possesses some but not all effector functions, which make it a desired candidate for many applications in which the half life of the antibody in vivo is important yet certain effector functions (such as complement and ADCC) are unnecessary or deleterious. In certain embodiments, the Pc activities of the produced immunoglobulin are measured to ensure that only the desired properties are maintained. In vitro and/or in vivo cytotoxicity assays can be conducted to confirm the reduction/depletion of CDC and/or ADCC activities. For example, Fc receptor (FcR) binding assays can be conducted to ensure that the antibody lacks Fc.gamma.R binding (hence likely lacking ADCC activity), but retains FcRn binding ability. The primary cells for mediating ADCC, NK cells, express Fc.γRIII only, whereas monocytes express Fc.gamma.RI, Fc.gamma.RII and Fc.gamma.RIII. FcR expression on hematopoietic cells is summarized in Table 3 on page 464 of Ravetch and Kinet, Annu. Rev. Immunol 9:457-92 (1991). An example of an in vitro assay to assess ADCC activity of a molecule of interest is described in U.S. Pat. No. 5,500,362 or 5,821,337. Useful effector cells for such assays include peripheral blood mononuclear cells (PBMC) and Natural Killer (NK) cells. Alternatively, or additionally, ADCC activity of the molecule of interest may be assessed in vivo, e.g., in a animal model such as that disclosed in Clynes et al. PNAS (USA) 95:652-656 (1998). C1q binding assays may also be carried out to confirm that the antibody is unable to bind C1q and hence lacks CDC activity. To assess complement activation, a CDC assay, for example as described in Gazzano-Santoro et al., J. Immunol. Methods 202:163 (1996), may be performed. FcRn binding and in viva clearance/half life determinations can also be performed using methods known in the art.

### Antibody Variants

[0351] In one aspect, the invention provides antibody fragments comprising modifications in the interface of Fc polypeptides comprising the Fc region, wherein the modifications facilitate and/or promote heterodimerization. These modifications comprise introduction of a protuberance into a first Fc polypeptide and a cavity into a second Fc polypeptide, wherein the protuberance is positionable in the cavity so as to promote complexing of the first and second Fc polypeptides. Methods of generating antibodies with these modifications are known in the art, e.g., as described in U.S. Pat. No. 5,731,168.

[0352] In some embodiments, amino acid sequence modification(s) of the antibodies described herein are contemplated. For example, it may be desirable to improve the binding affinity and/or other biological properties of the antibody. Amino acid sequence variants of the antibody are prepared by introducing appropriate nucleotide changes into the antibody nucleic acid, or by peptide synthesis. Such modifications include, for example, deletions from, and/or insertions into and/or substitutions of, residues within the amino acid sequences of the antibody. Any combination of deletion, insertion, and substitution is made to arrive at the final construct, provided that the final construct possesses the desired characteristics. The amino acid alterations may be introduced in the subject antibody amino acid sequence at the time that sequence is made.

[0353] To increase the half-life of the antibodies or polypeptide containing the amino acid sequences of this invention, one can attach a salvage receptor binding epitope to the antibody (especially an antibody fragment), as described, e.g., in U.S. Pat. No. 5,739,277. For example, a nucleic acid molecule encoding the salvage receptor binding epitope can be linked in frame to a nucleic acid encoding a polypeptide sequence of this invention so that the fusion protein expressed by the engineered nucleic acid molecule comprises the salvage receptor binding epitope and a polypeptide sequence of this invention. As used herein, the term “salvage receptor binding epitope” refers to an epitope of the Fc region of an IgG molecule (e.g., IgG.sub.1, IgG.sub.2, IgG.sub.3, or IgG.sub.4) that is responsible for increasing the in vivo serum half-life of the IgG molecule (e.g., Ghetie, V et al., (2000) Ann. Rev. Immunol. 18:739-766, Table 1). Antibodies with substitutions in an Fc region thereof and increased serum half-lives are also described in WO00/42072 (Presta, L.), WO 02/060919; Shields, R. L., et al., (2001) JBC 276(9):6591-6604; Hinton, P. R., (2004) JBC 279(8):6213-6216). In another embodiment, the serum half-life can also be increased, for example, by attaching other polypeptide sequences. For example, antibodies of this invention or other polypeptide containing the amino acid sequences of this invention can be attached to serum albumin or a portion of serum albumin that binds to the FcRn receptor or a serum albumin binding peptide so that serum albumin binds to the antibody or polypeptide, e.g., such polypeptide sequences are disclosed in WO01/45746. In another embodiment, the half-life of a Fab according to this invention is increased by methods disclosed in for example Dennis, M. S., et al., (2002) JBC 277(38):35035-35043 for serum albumin binding peptide sequences.

[0354] A useful method for identification of certain residues or regions of the antibody that are preferred locations for mutagenesis is called “alanine scanning mutagenesis” as described by Cunningham and Wells (1989) Science, 244:1081-1085. Here, a residue or group of target residues are identified (e.g., charged residues such as arg, asp, his, lys, and glu) and replaced by a neutral or negatively charged amino acid (e.g., alanine or polyalanine) to affect the interaction of the amino acids with antigen. Those amino acid locations demonstrating functional sensitivity to the substitutions then are refined by introducing further or other variants at, or for, the sites of substitution. Thus, while the site for introducing an amino acid sequence variation is predetermined, the nature of the mutation per se need not be predetermined. For example, to analyze the performance of a mutation at a given site, ala scanning or random mutagenesis is conducted at the target codon or region and the expressed immunoglobulins are screened for the desired activity.

[0355] Amino acid sequence insertions include amino- and/or carboxyl-terminal fusions ranging in length from one residue to polypeptides containing a hundred or more residues, as well as intrasequence insertions of single or multiple amino acid residues. Examples of terminal insertions include an antibody with an N-terminal methionyl residue or the antibody fused to a cytotoxic polypeptide. Other insertional variants of the antibody molecule include the fusion to the N- or C-terminus of the antibody to an enzyme (e.g. for ADEPT) or a polypeptide which increases the serum half-life of the antibody.

[0356] Another type of variant is an amino acid substitution variant. These variants have at least one amino acid residue in the antibody molecule replaced by a different residue. The sites of greatest interest for substitutional mutagenesis include the hypervariable regions, but FR alterations are also contemplated. Conservative substitutions are shown in Table 2 under the heading of “preferred substitutions”. If such substitutions result in a change in biological activity, then more substantial changes, denominated “exemplary substitutions” in the table below, or as further described below in reference to amino acid classes, may be introduced and the products screened.

[0357] Substantial modifications in the biological properties of the antibody are accomplished by selecting substitutions that differ significantly in their effect on maintaining (a) the structure of the polypeptide backbone in the area of the substitution, for example, as a sheet or helical conformation, (b) the charge or hydrophobicity of the molecule at the target site, or (c) the bulk of the side chain. Amino acids may be grouped according to similarities in the properties of their side chains (in A. L. Lehninger, in Biochemistry, second ed., pp. 73-75, Worth Publishers, New York (1975)):

(1) non-polar: Ala (A), Val (V), Leu (L), Ile (1), Pro (P), Phe (F), Trp (W), Met (M)
(2) uncharged polar: Gly (O), Ser (5), Thr (T), Cys (C), Tyr (Y), Asn (N), Gln (O)
(3) acidic: Asp (D), Glu (E)
(4) basic: Lys (K), Arg (R), H is (H)

[0358] Alternatively, naturally occurring residues may be divided into groups based on common side-chain properties:

(1) hydrophobic: Norleucine, Met, Ala, Val, Leu, Ile;
(2) neutral hydrophilic: Cys, Ser, Thr, Asn, Gln;
(3) acidic: Asp, Glu;
(4) basic: H is, Lys, Arg;
(5) residues that influence chain orientation: Gly, Pro;
(6) aromatic: Trp, Tyr, Phe.

[0359] Non-conservative substitutions will entail exchanging a member of one of these classes for another class. Such substituted residues also may be introduced into the conservative substitution sites or, into the remaining (non-conserved) sites.

[0360] One type of substitutional variant involves substituting one or more hypervariable region residues of a parent antibody (e.g. a humanized or human antibody). Generally, the resulting variant(s) selected for further development will have improved biological properties relative to the parent antibody from which they are generated. A convenient way for generating such substitutional variants involves affinity maturation using phage display. Briefly, several hypervariable region sites (e.g. 6-7 sites) are mutated to generate all possible amino acid substitutions at each site. The antibodies thus generated are displayed from filamentous phage particles as fusions to the gene III product of M13 packaged within each particle. The phage-displayed variants are then screened for their biological activity (e.g. binding affinity) as herein disclosed. In order to identify candidate hypervariable region sites for modification, alanine scanning mutagenesis can be performed to identify hypervariable region residues contributing significantly to antigen binding. Alternatively, or additionally, it may be beneficial to analyze a crystal structure of the antigen-antibody complex to identify contact points between the antibody and antigen. Such contact residues and neighboring residues are candidates for substitution according to the techniques elaborated herein. Once such variants are generated, the panel of variants is subjected to screening as described herein and antibodies with superior properties in one or more relevant assays may be selected for further development.

[0361] Nucleic acid molecules encoding amino acid sequence variants of the antibody are prepared by a variety of methods known in the art. These methods include, but are not limited to, isolation from a natural source (in the case of naturally occurring amino acid sequence variants) or preparation by oligonucleotide-mediated (or site-directed) mutagenesis, PCR mutagenesis, and cassette mutagenesis of an earlier prepared variant or a non-variant version of the antibody.

[0362] It may be desirable to introduce one or more amino acid modifications in an Fc region of the immunoglobulin polypeptides of the invention, thereby generating an Fc region variant. The Fc region variant may comprise a human Fc region sequence (e.g., a human IgG1, IgG2, IgG3 or IgG4 Fc region) comprising an amino acid modification (e.g. a substitution) at one or more amino acid positions including that of a hinge cysteine.

[0363] In accordance with this description and the teachings of the art, it is contemplated that in some embodiments, an antibody used in methods of the invention may comprise one or more alterations as compared to the wild type counterpart antibody, for example in the Fc region. These antibodies would nonetheless retain substantially the same characteristics required for therapeutic utility as compared to their wild type counterpart. For example, it is thought that certain alterations can be made in the Fc region that would result in altered (i.e., either improved or diminished) C1q binding and/or Complement Dependent Cytotoxicity (CDC), for example, as described in WO99/51642. See also Duncan & Winter Nature 322:738-40 (1988); U.S. Pat. No. 5,648,260; U.S. Pat. No. 5,624,821; and WO94/29351 concerning other examples of Fc region variants.

### Antibody Derivatives

[0364] The antibodies of the present invention can be further modified to contain additional nonproteinaceous moieties that are known in the art and readily available. In certain embodiments, the moieties suitable for derivatization of the antibody are water soluble polymers. Non-limiting examples of water soluble polymers include, but are not limited to, polyethylene glycol (PEG), copolymers of ethylene glycol/propylene glycol, carboxymethylcellulose, dextran, polyvinyl alcohol, polyvinyl pyrrolidone, poly-1,3-dioxolane, poly-1,3,6-trioxane, ethylene/maleic anhydride copolymer, polyaminoacids (either homopolymers or random copolymers), and dextran or poly(n-vinyl pyrrolidone)polyethylene glycol, propropylene glycol homopolymers, prolypropylene oxide/ethylene oxide co-polymers, polyoxyethylated polyols (e.g., glycerol), polyvinyl alcohol, and mixtures thereof. Polyethylene glycol propionaldehyde may have advantages in manufacturing due to its stability in water. The polymer may be of any molecular weight, and may be branched or unbranched. The number of polymers attached to the antibody may vary, and if more than one polymers are attached, they can be the same or different molecules. In general, the number and/or type of polymers used for derivatization can be determined based on considerations including, but not limited to, the particular properties or functions of the antibody to be improved, whether the antibody derivative will be used in a therapy under defined conditions, etc.

### Uses

[0365] An antibody of the present invention may be used in, for example, in vitro, ex vivo and in vivo therapeutic methods. Variant antibodies of the invention can be used as an antagonist to partially or fully block the specific antigen activity in vitro, ex vivo and/or in vivo. Moreover, at least some of the antibodies diversified in accordance to the methods disclosed herein can neutralize antigen activity from other species. Accordingly, the antibodies of the invention can be used to inhibit a specific antigen activity, e.g., in a cell culture containing the antigen, in human subjects or in other mammalian subjects having the antigen with which an antibody of the invention cross-reacts (e.g. chimpanzee, baboon, marmoset, cynomolgus and rhesus, pig or mouse). Thus, in an exemplary embodiment, a diversified antibody of the invention can be used for inhibiting antigen activities by contacting the antibody with the antigen such that antigen activity is inhibited. In certain embodiments, the antigen is a human protein molecule.

[0366] In one embodiment, a diversified antibody in accordance to the methods of the invention can be used in a method for inhibiting an antigen in a subject suffering from a disorder in which the antigen activity is detrimental, comprising administering to the subject an antibody of the invention such that the antigen activity in the subject is inhibited. In certain embodiments, the antigen is a human protein molecule and the subject is a human subject. Alternatively, the subject can be a mammal expressing the antigen with which an antibody of the invention binds. Still further the subject can be a mammal into which the antigen has been introduced (e.g., by administration of the antigen or by expression of an antigen transgene). An antibody of the invention can be administered to a human subject for therapeutic purposes. Moreover, an antibody of the invention can be administered to a non-human mammal expressing an antigen with which the immunoglobulin cross-reacts (e.g., a primate, pig or mouse) for veterinary purposes or as an animal model of human disease. Regarding the latter, such animal models may be useful for evaluating the therapeutic efficacy of antibodies of the invention (e.g., testing of dosages and time courses of administration).

[0367] Having generally described the invention, the same will be more readily understood by reference to the following examples, which are provided by way of illustration and are not intended as limiting.

### Example 1

### Generation of an Antibody Discovery Library

[0368] It has been described previously the methods for generating an antibody library from lead sequences (U.S. Pat. No. 7,117,096) for affinity maturation and optimization. Such an approach was expanded to generate a nave discovery library without prior knowledge of lead sequences. The purpose of such a library design was to incorporate a large population of sequences that can produce productive and functional interactions with a wide array of antigens. To design such a “discovery” library, a knowledge-based, rational approach, utilizing existing data, is preferable to a purely randomization approach. A knowledge-based library design utilized structural database as well as sequence database and any combination of data, such as statistical distribution, probabilistic models, and structural motifs, to identify “good” sequences.

[0369] From a structural point of view, the scaffolds of antibodies, or the immunoglobulin fold, is one of the most abundant observed in nature and is highly conserved among various antibodies and related molecules. For the purposes of library design, we focused primarily on the structure of the Fv domain, the variable fragment of the antibody. Structurally, various functions of an antibody are confined to a discrete set of protein segments. The sites that recognize and bind antigen consist of three hyper-variable or complementarity-determining regions (CDRs) that lie within the variable (VH and VL) regions at the N-terminal ends of the two H and two L chains. The constant domains are not directly involved in binding to an antigen, but are involved in various structural support and effector functions.

[0370] Natural VH and VL chains have the same general structures, and each domain comprises four framework regions, whose sequences are somewhat conserved, connected by three CDRs. The four framework regions largely adopt a beta-sheet conformation and the CDRs form loops connecting, and in some cases forming part of, the beta-sheet structure. The CDRs in each chain are held in close proximity by the framework regions and, with the CDRs from the other chain, contribute to the formation of the antigen binding site.

[0371] The VL and VH domains interact via the five-stranded beta sheets to form a nine-stranded beta barrel of about 8.4 Angstroms radius, with the strands at the domain interface inclined at approximately 50 degree to one another. The domain pairing brings the CDR loops into close proximity. The CDRs themselves form some 25% of the VL-VH domain interface.

[0372] The six CDRs, (CDR-L1, -L2 and -L3 for the light chain, and CDR-H1, -H2 and -H3 for the heavy chain), are supported on the beta barrel framework, forming the antigen binding site. While their sequences are hypervariable in comparison with the rest of the immunoglobulin structure, some of the loops show a relatively high degree of both sequence and structural conservation. In particular, CDR-L2 and CDR-H1 are highly conserved in conformation.

[0373] A library for antibody discovery can be typically described generally by an amino acid sequence of a select number of FRs and variant mixtures of CDR sequences. Variants are introduced primarily in the CDR regions since these directly interact with antigens.

[0374] Computer-implemented analysis and modeling of antibody combining site (or antigen binding site), based on homology analysis comparing the target antibody sequence with those of antibodies with known structures or structural motifs in existing data bases (e.g. the Brookhaven Protein Data Bank), were utilized in PDL1 design. By using such homology-based modeling methods approximate three-dimensional structure of the target antibody was constructed.

[0375] The inventors believe that properly folded structures are essential for binding and function of an antibody. Identifying such sequences is still a challenge in modern protein science. By analyzing available high resolution crystal structures, we observed that the canonical structures can be seen in majority of the CDR as well as FR structures. These can be categorized into length groups and within each length group, e.g., VH_CDR3, canonical structures can be identified that provide compatible structures for a set of sequence variants,

[0376] For some representative FRs, the root mean square deviation (RMSD) for alpha carbon is <1 Angstrom whereas CDR3 from both VH and VL show great backbone diversity among many lengths. FIG. 1 shows the consistency of FR backbones among several hundred known crystal structures. The figure also shows the diversity of structural folds for various lengths.

### Example 2

### Frameworks for Antibody Discovery Library PDL1

[0377] PDL1 library (production discovery library 1) is a fully human and synthetic Fab library. One VH framework from human germline VH3 family and three light chains from human germline VK1, VK3 and Vlambda 1 families were chosen, based on their highly frequent usage and canonical structures, to accommodate the designed CDR libraries. FIG. 2 illustrates those VH and VL framework sequences. X presents the amino acid in CDR region based on Abmaxis' definition.

### Example 3

### PDL1 Library CDR Length Selection

[0378] Sequence and structure analysis were carried out on SCOP 1.69 database (Murzin A. G., Brenner S. E., Hubbard T., Chathia C. (1995). SCOP: a structural classification of proteins database for the investigation of sequences and structures. J. Mol. Biol. 247, 536-540). 702 unique antibody heavy chain variable regions (VH) and 774 unique antibody light chain variable regions (VL) were analyzed. Each unique chain was parsed into 4 frameworks and 3 CDR segments based on Kabat definition except VH CDR1 which was defined as Chothia definition.

[0379] The CDR length distribution of the antibody sequences was obtained through analysis. The percentage for the certain CDR length over the total number of available sequence for that CDR was calculated and summarized in the table 1:

TABLE 1
CDR length distribution of human antibody in SCOP 1.69

| | CDR length | # of sequence | % |
|---|---|---|---|
| VH_CDR1 | 2 | 1 | <1 |
| | 5 | 1 | <1 |
| | 7 | 6 | 1 |
| | 8 | 5 | 1 |
| | 9 | 3 | <1 |
| | 10 | 622 | 89 |
| | 11 | 43 | 6 |
| | 12 | 19 | 3 |
| | 13 | 1 | <1 |
| VH_CDR2 | 13 | 1 | <1 |
| | 14 | 2 | <1 |
| | 15 | 3 | <1 |
| | 16 | 172 | 25 |
| | 17 | 454 | 65 |
| | 19 | 67 | 10 |
| | 22 | 3 | <1 |
| VH_CDR3 | 2 | 1 | <1 |
| | 3 | 16 | 2 |
| | 4 | 7 | 1 |
| | 5 | 65 | 9 |
| | 6 | 16 | 2 |
| | 7 | 51 | 7 |
| | 8 | 70 | 10 |
| | 9 | 55 | 8 |
| | 10 | 129 | 19 |
| | 11 | 98 | 14 |
| | 12 | 51 | 7 |
| | 13 | 41 | 6 |
| | 14 | 38 | 5 |
| | 15 | 9 | 1 |
| | 16 | 9 | 1 |
| | 17 | 9 | 1 |
| | 18 | 4 | 1 |
| | 19 | 10 | 1 |
| | 20 | 5 | 1 |
| | 22 | 4 | 1 |
| | 24 | 8 | 1 |
| VL_CDR1 | 8 | 1 | <1 |
| | 9 | 1 | <1 |
| | 10 | 37 | 5 |
| | 11 | 311 | 40 |
| | 12 | 27 | 3 |
| | 13 | 24 | 3 |
| | 14 | 106 | 14 |
| | 15 | 35 | 5 |
| | 16 | 168 | 22 |
| | 17 | 64 | 8 |
| VL_CDR2 | 2 | 1 | <1 |
| | 3 | 1 | <1 |
| | 5 | 2 | <1 |
| | 7 | 769 | 99 |
| | 8 | 1 | <1 |
| VL_CDR3 | 2 | 1 | <1 |
| | 7 | 2 | <1 |
| | 8 | 45 | 6 |
| | 9 | 642 | 83 |
| | 10 | 50 | 6 |
| | 11 | 28 | 4 |
| | 12 | 2 | <1 |

PDL1 library captured the majority of the CDR length and structural diversity as shown in table 2.

TABLE 2
PDL1 captured CDR length distribution

| | PDL1 captured CDR Length | % |
|---|---|---|
| VH_CDR1 | 10, 11, 12 | 98 |
| VH_CDR2 | 16, 17, 19 | 99 |
| VH_CDR3 | 5, 7, 8, 9, 10, 11, 12, 13, 14 | 86 |
| VL_CDR1 | 10, 11, 14, 15, 16, 17 | 93 |
| VL_CDR2 | 7 | 99 |
| VL_CDR3 | 8, 9, 10, 11 | 99 |

### Example 4

### PDL1 CDR Structural Scaffold Selection

[0380] For the CDRs with the length listed in the tablet, the corresponded CDR structures in SCOP 1.69 structure database were clustered according to the CA atoms with a RMSD 2.5 Å cutoff. The number of the structural clusters were captured in PDL1 are summarized in table 3.

TABLE 3
The number of CDR structure scaffold and captured by PDL1

| | | Number of PDL1 CDR |
|---|---|---|
| | CDR Length | structural cluster |
| VH_CDR1 | 10 | 6 |
| | 11 | 1 |
| | 12 | 2 |
| VH_CDR2 | 16 | 2 |
| | 17 | 5 |
| | 19 | 2 |
| VH_CDR3 | 5 | 2 |
| | 7 | 2 |
| | 8 | 4 |
| | 9 | 5 |
| | 10 | 9 |
| | 11 | 9 |
| | 12 | 7 |
| | 13 | 8 |
| | 14 | 8 |
| VL_CDR1 | 10 | 2 |
| | 11 | 1 |
| | 14 | 6 |
| | 15 | 2 |
| | 16 | 2 |
| | 17 | 1 |
| VL_CDR2 | 7 | 1 |
| VL_CDR3 | 8 | 1 |
| | 9 | 2 |
| | 10 | 2 |
| | 11 | 2 |
| Total | | 94 |

FIG. 3 further illustrate heavy chain CDR length distributions and CDR loop structure clusters.

### Example 5

### PDL1 CDR Library Design

[0381] For each CDR structural cluster listed in table 3, the corresponded CDR sequences were used as lead sequences to generate the variant profile using both sequence and structure-based design as described in U.S. Pat. No. 7,117,096 B2. The design process is illustrated in FIG. 4

[0382] As for the sequence-based design, the antibody sequence database profiling was carried out for each leading sequence. The antibody sequence database used here are the combination of the antibody sequences from Kabat database, IMGT, PDB and Merck internal antibody database. The variant profiles were identified by the sequence alignment, statistical and probabilistic analysis using HMM and filtered with certain cutoff value to make the size of the variant profile within the computational or experimental limit.

[0383] As for the structure-based design, the variants were ranked against the corresponded CDR structural cluster by the van der Waals energy for the packing stabilities. In addition, the variants were also assessed on the chain and Fv structures. The chain and Fv structures were built by the Abmaxis antibody structure modeling package which was described in U.S. Pat. No. 117,096 B2.

[0384] The final CDR libraries were obtained by consolidating both sequence and structure based design, as shown in FIG. 5-10.

[0385] The CDR libraries shown in FIG. 5-10 were split into multiple small libraries to avoid undesired amino acids and stop codons from radon DNA codon combinations, such as cyteins, glycosylation sites, amber stop codon, etc, and to reduce the final library sizes. Table 4 illustrates the changes of number of CDR libraries before and after library splitting.

TABLE 4
CDR libraries before and after splitting to avoid undesired features

Number of libraries

| | fully codon | limited codon |
|---|---|---|
| | degeneracy | degeneracy |
| VH_CDR1 | 9 | 24 |
| VH_CDR2 | 9 | 13 |
| VH_CDR3 | 54 | 523 |
| VL_CDR1 | 14 | 14 |
| VL_CDR2 | 1 | 1 |
| VL_CDR3 | 7 | 44 |
| VLambda_CDR3 | 7 | 33 |
| total | 101 | 642 |

FIG. 11 shows examples to reduce the possibility of cyteins from 54% (before split) to 0% (post split), as well as the size of libraries.
The split final CDR libraries of PDL1 library are listed below.

PDL1_VH_CDR1.1
KASGX1TFX2X3YYMHWVR
X1: F Y
X2: S T
X3: D G N S
PDL1_VH_CDR1.2
KASGX1TFX2X3YX41VIHWVR
X1: F Y
X2: S T
X3: D G N S
X4: A G S W
PDL1_VH_CDR1.3
KASGX1TFX2X3YYMX4WVR
X1: F Y
X2: S T
X3: N S
X4: H P S Y
PDL1_VH_CDR1.4
KASGX1TFX2X3YX4MX5WVR
X1: F Y
X2: S T
X3: N S
X4: A G S W
X5: H P S Y
PDL1_VH_CDR1.5
KASGX1TFX2X3YYMX4WVR
X1: F Y
X2: S T
X3: A D S Y
X4: H P S Y
PDL1_VH_CDR1.6
KASGX1TFX2X3YX4MX5WVR
X1: F Y
X2: S T
X3: A D S Y
X4: A G
X5: H P S Y
PDL1_VH_CDR1.7
AASGX1TFX2X3YYMHWVR
X1: F Y
X2: S T
X3: D G N S
PDL1_VH_CDR1.8
AASGX1TFX2X3YX4MHWVR
X1: F Y
X2: S T
X3: D G N S
X4: A G S W
PDL1_VH_CDR1.9
KASGX1TFX2X3YYMX4WVR
X1: F Y
X2: S T
X3: N S
X4: H N
PDL1_VH_CDR1.10
KASGX1TFX2X3YX4MX5WVR
X1: F Y
X2: S T
X3: N S
X4: A G S W
X5: H N
PDL1_VH_CDR1.11
KASGYX1FTX2YX3X4X5WVK
X1: S T
X2: D G N S
X3: G W
X4: I M
X5: H N
PDL1_VH_CDR1.12
TVTGYSIX1SX2YX3WX4WIR
X1: S T
X2: D G
X3: A D F H L P S V Y
X4: D G H N R S
PDL1_VH_CDR1.13
TFSGFSLX1TX2GX3GVX4WIR
X1: S T
X2: S T
X3: M V
X4: A G S T
PDL1_VH_CDR1.14
TVSGX1SIX2SGX3YYWX4WIR
X1: D G
X2: N S
X3: A D G N S T
X4: G S
PDL1_VH_CDR2.1
WVGYISX1X2GSTYYX3X4SX5KX6RFT
X1: S Y
X2: A D S Y
X3: A D N T
X4: A D H P
X5: L V
X6: G S
PDL1_VH_CDR2.2
WIGX1IX2X3SGSTX4YNPSLKSRVT
X1: A S V D E F L Y
X2: N S T Y
X3: H Y
X4: N Y
PDL1_VH_CDR2.3
WIGX1IWX2SGSTX3YNPSLKSRVT
X1: A S V D E F L Y
X2: H Y
X3: N Y
PDL1_VH_CDR2.4
WVGRIX1PX2GGX3TYYADSX4KGRFT
X1: N S
X2: D G N S
X3: D G N S
X4: F V
PDL1_VH_CDR2.5
WIGX1IX2PX3X4GGTX5YNX6KFKGKAT
X1: R W
X2: D N
X3: D G N S
X4: N S
X5: K N
X6: E Q
PDL1_VH_CDR2.6
WMGYIX1YSGX2TX3YNPX4LKX5RISI
X1: N S T Y
X2: G S
X3: N S T Y
X4: A D S Y
X5: K N R S
PDL1_VH_CDR2.7
WIGRIX1PX2X3GGTX4YNX5KFKX6KAT
X1: D N
X2: N Y
X3: N S
X4: K N
X5: E Q
X6: G S
PDL1_VH_CDR2.8
WIGRIX1PX2X3GGTX4YNX5KFKGKAT
X1: D N
X2: S Y
X3: N S
X4: K N
X5: E Q
PDL1_VH_CDR2.9
WIGRIX1PX2X3GGTX4YNX5KFKGKAT
X1: D N
X2: D G N S
X3: N S
X4: K N
X5: E Q
PDL1_VH_CDR2.10
WVGRIRX1KX2X3GYTTX4YAASVKGRFT
X1: N S
X2: A S T
X3: D N
X4: D E
PDL1_VH_CDR2.11
WVGRIRX1KX2X3GGTTX4YAASVKGRFT
X1: N S
X2: A S T
X3: D N
X4: D E
PDL1_VH_CDR2.12
WIGX1IYPGX2GGTX3YNX4KFKGKATLT
X1: D Y
X2: N S
X3: K N R S
X4: E Q
PDL1_VH_CDR2.13
WIGX1IYPGX2GGTX3YNX4KFKGKATLT
X1: R W
X2: N S
X3: K N R S
X4: E Q
PDL1_VH_CDR3.1
CARX1X2X3X4YWGQ
X1: L I V D E F F I K N Q Y
X2: F L Y
X3: F L Y
X4: A D
PDL1_VH_CDR3.2
CARX1X2X3X4YWGQ
X1: A G P R S W
X2: F L Y
X3: F L Y
X4: A D
PDL1_VH_CDR3.3
CARX1X2X3X4YWGQ
X1: L Q V D E F H I K M N Y
X2: A G T D E K N R S
X3: F L Y
X4: A D
PDL1_VH_CDR3.4
CARX1X2X3X4YWGQ
X1: A G P R S W
X2: A G T D E K N R S
X3: F L Y
X4: A D
PDL1_VH_CDR3.5
CARX1X2X3X4YWGQ
X1: L I V D E F H K N Q Y
X2: F L Y
X3: G M R V
X4: A D
PDL1_VH_CDR3.6
CARX1X2X3X4YWGQ
X1: A G P R S W
X2: F L Y
X3: G M R V
X4: A D
PDL1_VH_CDR3.7
CARX1X2X3X4YWGQ
X1: L I V D E F H K N Q Y
X2: A G T D E K N R S
X3: G M R V
X4: A D
PDL1_VH_CDR3.8
CARX1X2X3X4YWGQ
X1: A G P R S W
X2: A G T D E K N R S
X3: G M R V
X4: A D
PDL1_VH_CDR3.9
CARX1X2X3X4YWGQ
X1: A E K T
X2: A G T D E K N R S
X3: F L
X4: A D
PDL1_VH_CDR3.10
CARX1X2X3X4YWGQ
X1: A T D E K N
X2: F H L P S Y
X3: G M R V
X4: A D
PDL1_VH_CDR3.11
CARX1X2X3X4YWGQ
X1: A E K T
X2: A G T D E K N R S
X3: G M R V
X4: A D
PDL1_VH_CDR3.12
CARX1X2X3X4YWGQ
X1: D F H I L N V Y
X2: F H L P S Y
X3: F L
X4: A D
PDL1_VH_CDR3.13
CARX1X2X3X4YWGQ
X1: G R W
X2: F H L P S Y
X3: F L
X4: A D
PDL1_VH_CDR3.14
CARX1X2X3X4YWGQ
X1: D F H I L N V Y
X2: A G T D E K N R S
X3: F L
X4: A D
PDL1_VH_CDR3.15
CARX1X2X3X4YWGQ
X1: G R W
X2: A G T D E K N R S
X3: F L
X4: A D
PDL1_VH_CDR3.16
CARX1X2X3X4YWGQ
X1: D F H I L N V Y
X2: F H L P S Y
X3: G M R V
X4: A D
PDL1_VH_CDR3.17
CARX1X2X3X4YWGQ
X1: G R W
X2: F H L P S Y
X3: G M R V
X4: A D
PDL1_VH_CDR3.18
CARX1X2X3X4YWGQ
X1: D F H I L N V Y
X2: A G T D E K N R S
X3: G M R V
X4: A D
PDL1_VH_CDR3.19
CARX1X2X3X4YWGQ
X1: G R W
X2: A G T D E K N R S
X3: G M R V
X4: A D
PDL1_VH_CDR3.20
CARX1X2X3X4YWGQ
X1: A T D E K N
X2: F H L P S Y
X3: F L
X4: A D
PDL1_VH_CDR3.21
CARX1X2X3YX4X5X6WGQ
X1: G R
X2: S Y
X3: S Y
X4: F I L M
X5: A D
X6: D F V Y
PDL1_VH_CDR3.22
CARX1X2X3YX4X5X6WGQ
X1: G R
X2: D G H R
X3: S Y
X4: F I L M
X5: A D
X6: D F V Y
PDL1_VH_CDR3.23
CARX1X2X3YX4X5X6WGQ
X1: G R
X2: S Y
X3: A G S T
X4: F I L M
X5: A D
X6: D F V Y
PDL1_VH_CDR3.24
CARX1X2X3YX4X5X6WGQ
X1: G R
X2: D G H R
X3: A G S T
X4: F I L M
X5: A D
X6: D F V Y
PDL1_VH_CDR3.25
CARX1X2X3X4X5X6X7WGQ
X1: G R
X2: S Y
X3: S Y
X4: A G
X5: F I L M
X6: A D
X7: D F V Y
PDL1_VH_CDR3.26
CARX1X2X3X4X5X6X7WGQ
X1: G R
X2: D G H R
X3: S Y
X4: A G
X5: F I L M
X6: A D
X7: D F V Y
PDL1_VH_CDR3.27
CARX1X2X3X4X5X6X7WGQ
X1: G R
X2: S Y
X3: A G S T
X4: A G
X5: F I L M
X6: A D
X7: D F V Y
PDL1_VH_CDR3.28
CARX1X2X3X4X5X6X7WGQ
X1: G R
X2: D G H R
X3: A G S T
X4: A G
X5: F I L M
X6: A D
X7: D F V Y
PDL1_VH_CDR3.29
CARGYYX1X2X3YWGQ
X1: A D G
X2: F I L M
X3: A D
PDL1_VH_CDR3.30
CARX1X2YX3X4X5YWGQ
X1: S Y
X2: D G H N R S
X3: A D G
X4: F I L M
X5: A D
PDL1_VH_CDR3.31
CARGX1YX2X3X4YWGQ
X1: D G H N R S
X2: A D G
X3: F I L M
X4: A D
PDL1_VH_CDR3.32
CARX1YX2X3X4X5YWGQ
X1: S Y
X2: G W
X3: A D G
X4: F I L M
X5: A D
PDL1_VH_CDR3.33
CARGYX1X2X3X4YWGQ
X1: G W
X2: A D G
X3: F I L M
X4: A D
PDL1_VH_CDR3.34
CARX1X2X3X4X5X6YWGQ
X1: S Y
X2: D G H N R S
X3: G W
X4: A D G
X5: F I L M
X6: A D
PDL1_VH_CDR3.35
CARGX1X2X3X4X5YWGQ
X1: D G H N R S
X2: G W
X3: A D G
X4: F I L M
X5: A D
PDL1_VH_CDR3.36
CARX1YYX2X3X4YWGQ
X1: S Y
X2: S Y
X3: F I L M
X4: A D
PDL1_VH_CDR3.37
CARGYYX1X2X3YWGQ
X1: S Y
X2: F I L M
X3: A D
PDL1_VH_CDR3.38
CARX1X2YX3X4X5YWGQ
X1: S Y
X2: D G H N R S
X3: S Y
X4: F I L M
X5: A D
PDL1_VH_CDR3.39
CARGX1YX2X3X4YWGQ
X1: D G H N R S
X2: S Y
X3: F I L M
X4: A D
PDL1_VH_CDR3.40
CARX1YX2X3X4X5YWGQ
X1: S Y
X2: G W
X3: S Y
X4: F I L M
X5: A D
PDL1_VH_CDR3.41
CARGYX1X2X3X4YWGQ
X1: G W
X2: S Y
X3: F I L M
X4: A D
PDL1_VH_CDR3.42
CARX1X2X3X4X5X6YWGQ
X1: S Y
X2: D G H N R S
X3: G W
X4: S Y
X5: F I L M
X6: A D
PDL1_VH_CDR3.43
CARGX1X2X3X4X5YWGQ
X1: D G H N R S
X2: G W
X3: S Y
X4: F I L M
X5: A D
PDL1_VH_CDR3.44
CARX1YYX2X3X4YWGQ
X1: S Y
X2: A D G
X3: F I L M
X4: A D
PDL1_VH_CDR3.45
CARX1X2X3X4X5X6DYWGQ
X1: D G H R
X2: S Y
X3: S Y
X4: D G
X5: A D S Y
X6: F I L M
PDL1_VH_CDR3.46
CARX1X2X3X4X5X6DYWGQ
X1: S Y
X2: D G H R
X3: S Y
X4: D G
X5: A D S Y
X6: F I L M
PDL1_VH_CDR3.47
CARX1X2X3X4X5X6DYWGQ
X1: D G H R
X2: D G H R
X3: S Y
X4: D G
X5: A D S Y
X6: F I L M
PDL1_VH_CDR3.48
CARX1X2GX3X4X5DYWGQ
X1: S Y
X2: S Y
X3: D G
X4: A D S Y
X5: F I L M
PDL1_VH_CDR3.49
CARX1X2GX3X4X5DYWGQ
X1: D G H R
X2: S Y
X3: D G
X4: A D S Y
X5: F I L M
PDL1_VH_CDR3.50
CARX1X2GX3X4X5DYWGQ
X1: S Y
X2: D G H R
X3: D G
X4: A D S Y
X5: F I L M
PDL1_VH_CDR3.51
CARX1X2GX3X4X5DYWGQ
X1: D G H R
X2: D G H R
X3: D G
X4: A D S Y
X5: F I L M
PDL1_VH_CDR3.52
CARX1X2X3YX4X5DYWGQ
X1: S Y
X2: S Y
X3: S Y
X4: A D S Y
X5: F I L M
PDL1_VH_CDR3.53
CARX1X2X3YX4X5DYWGQ
X1: D G H R
X2: S Y
X3: S Y
X4: A D S Y
X5: F I L M
PDL1_VH_CDR3.54
CARX1X2X3YX4X5DYWGQ
X1: S Y
X2: D G H R
X3: S Y
X4: A D S Y
X5: F I L M
PDL1_VH_CDR3.55
CARX1X2X3YX4X5DYWGQ
X1: D G H R
X2: D G H R
X3: S Y
X4: A D S Y
X5: F I L M
PDL1_VH_CDR3.56
CARX1X2GYX3X4DYWGQ
X1: S Y
X2: S Y
X3: A D S Y
X4: F I L M
PDL1_VH_CDR3.57
CARX1X2GYX3X4DYWGQ
X1: D G H R
X2: S Y
X3: A D S Y
X4: F I L M
PDL1_VH_CDR3.58
CARX1X2GYX3X4DYWGQ
X1: S Y
X2: D G H R
X3: A D S Y
X4: F I L M
PDL1_VH_CDR3.59
CARX1X2GYX3X4DYWGQ
X1: D G H R
X2: D G H R
X3: A D S Y
X4: F I L M
PDL1_VH_CDR3.60
CARX1X2X3X4X5X6DYWGQ
X1: S Y
X2: S Y
X3: S Y
X4: D G
X5: A D S Y
X6: F I L M
PDL1_VH_CDR3.61
CARX1YX2X3X4FX5YWGQ
X1: D E Y
X2: S Y
X3: S Y
X4: A D H P S Y
X5: A D
PDL1_VH_CDR3.62
CARX1X2X3X4X5FX6YWGQ
X1: D E Y
X2: D G
X3: S Y
X4: S Y
X5: A D H P S Y
X6: A D
PDL1_VH_CDR3.63
CARX1YGX2X3FX4YWGQ
X1: D E Y
X2: S Y
X3: A D H P S Y
X4: A D
PDL1_VH_CDR3.64
CARX1X2GX3X4FX5YWGQ
X1: D E Y
X2: D G
X3: S Y
X4: A D H P S Y
X5: A D
PDL1_VH_CDR3.65
CARX1YX2X3X4FX5YWGQ
X1: D E Y
X2: S Y
X3: D G N S
X4: A D H P S Y
X5: A D
PDL1_VH_CDR3.66
CARX1X2X3X4X5FX6YWGQ
X1: D E Y
X2: D G
X3: S Y
X4: D G N S
X5: A D H P S Y
X6: A D
PDL1_VH_CDR3.67
CARX1YGX2X3FX4YWGQ
X1: D E Y
X2: D G N S
X3: A D H P S Y
X4: A D
PDL1_VH_CDR3.68
CARX1X2GX3X4FX5YWGQ
X1: D E Y
X2: D G
X3: D G N S
X4: A D H P S Y
X5: A D
PDL1_VH_CDR3.69
CARX1YX2X3X4X5DYWGQ
X1: D F H L V Y
X2: S Y
X3: S Y
X4: A D F S V Y
X5: F I L M
PDL1_VH_CDR3.70
CARX1X2X3X4X5X6DYWGQ
X1: D F H L V Y
X2: G R
X3: S Y
X4: S Y
X5: A D F S V Y
X6: F I L M
PDL1_VH_CDR3.71
CARX1YGX2X3X4DYWGQ
X1: D F H L V Y
X2: S Y
X3: A D F S V Y
X4: F I L M
PDL1_VH_CDR3.72
CARX1X2GX3X4X5DYWGQ
X1: D F H L V Y
X2: G R
X3: S Y
X4: A D F S V Y
X5: F I L M
PDL1_VH_CDR3.73
CARX1YX2X3X4X5DYWGQ
X1: D F H L V Y
X2: S Y
X3: D G N S
X4: A D F S V Y
X5: F I L M
PDL1_VH_CDR3.74
CARX1X2X3X4X5X6DYWGQ
X1: D F H L V Y
X2: G R
X3: S Y
X4: D G N S
X5: A D F S V Y
X6: F I L M
PDL1_VH_CDR3.75
CARX1YGX2X3X4DYWGQ
X1: D F H L V Y
X2: D G N S
X3: A D F S V Y
X4: F I L M
PDL1_VH_CDR3.76
CARX1X2GX3X4X5DYWGQ
X1: D F H L V Y
X2: G R
X3: D G N S
X4: A D F S V Y
X5: F I L M
PDL1_VH_CDR3.77
CERYDSPX1GDYWGQ
X1: L M P T
PDL1_VH_CDR3.78
CARX1YYGYX2X3X4X5WGQ
X1: D G
X2: A D S Y
X3: F I L M
X4: A D
X5: D F V Y
PDL1_VH_CDR3.79
CARYGYGYX1X2X3X4WGQ
X1: A D S Y
X2: F I L M
X3: A D
X4: D F V Y
PDL1_VH_CDR3.80
CARX1GYGYX2X3X4X5WGQ
X1: D G
X2: A D S Y
X3: F I L M
X4: A D
X5: D F V Y
PDL1_VH_CDR3.81
CARYYGGYX1X2X3X4WGQ
X1: A D S Y
X2: F I L M
X3: A D
X4: D F V Y
PDL1_VH_CDR3.82
CARX1YGGYX2X3X4X5WGQ
X1: D G
X2: A D S Y
X3: F I L M
X4: A D
X5: D F V Y
PDL1_VH_CDR3.83
CARYGGGYX1X2X3X4WGQ
X1: A D S Y
X2: F I L M
X3: A D
X4: D F V Y
PDL1_VH_CDR3.84
CARX1GGGYX2X3X4X5WGQ
X1: D G
X2: A D S Y
X3: F I L M
X4: A D
X5: D F V Y
PDL1_VH_CDR3.85
CARYYYYGX1X2X3X4WGQ
X1: A D S Y
X2: F I L M
X3: A D
X4: D F V Y
PDL1_VH_CDR3.86
CARX1YYYGX2X3X4X5WGQ
X1: D G
X2: A D S Y
X3: F I L M
X4: A D
X5: D F V Y
PDL1_VH_CDR3.87
CARYGYYGX1X2X3X4WGQ
X1: A D S Y
X2: F I L M
X3: A D
X4: D F V Y
PDL1_VH_CDR3.88
CARYYYYYX1X2X3X4WGQ
X1: A D S Y
X2: F I L M
X3: A D
X4: D F V Y
PDL1_VH_CDR3.89
CARX1GYYGX2X3X4X5WGQ
X1: D G
X2: A D S Y
X3: F I L M
X4: A D
X5: D F V Y
PDL1_VH_CDR3.90
CARYYGYGX1X2X3X4WGQ
X1: A D S Y
X2: F I L M
X3: A D
X4: D F V Y
PDL1_VH_CDR3.91
CARX1YGYGX2X3X4X5WGQ
X1: D G
X2: A D S Y
X3: F I L M
X4: A D
X5: D F V Y
PDL1_VH_CDR3.92
CARYGGYGX1X2X3X4WGQ
X1: A D S Y
X2: F I L M
X3: A D
X4: D F V Y
PDL1_VH_CDR3.93
CARX1GGYGX2X3X4X5WGQ
X1: D G
X2: A D S Y
X3: F I L M
X4: A D
X5: D F V Y
PDL1_VH_CDR3.94
CARYYYGGX1X2X3X4WGQ
X1: A D S Y
X2: F I L M
X3: A D
X4: D F V Y
PDL1_VH_CDR3.95
CARX1YYGGX2X3X4X5WGQ
X1: D G
X2: A D S Y
X3: F I L M
X4: A D
X5: D F V Y
PDL1_VH_CDR3.96
CARYGYGGX1X2X3X4WGQ
X1: A D S Y
X2: F I L M
X3: A D
X4: D F V Y
PDL1_VH_CDR3.97
CARX1GYGGX2X3X4X5WGQ
X1: D G
X2: A D S Y
X3: F I L M
X4: A D
X5: D F V Y
PDL1_VH_CDR3.98
CARYYGGGX1X2X3X4WGQ
X1: A D S Y
X2: F I L M
X3: A D
X4: D F V Y
PDL1_VH_CDR3.99
CARX1YYYYX2X3X4X5WGQ
X1: D G
X2: A D S Y
X3: F I L M
X4: A D
X5: D F V Y
PDL1_VH_CDR3.100
CARX1YGGGX2X3X4X5WGQ
X1: D G
X2: A D S Y
X3: F I L M
X4: A D
X5: D F V Y
PDL1_VH_CDR3.101
CARYGGGGX1X2X3X4WGQ
X1: A D S Y
X2: F I L M
X3: A D
X4: D F V Y
PDL1_VH_CDR3.102
CARX1GGGGX2X3X4X5WGQ
X1: D G
X2: A D S Y
X3: F I L M
X4: A D
X5: D F V Y
PDL1_VH_CDR3.103
CARYGYYYX1X2X3X4WGQ
X1: A D S Y
X2: F I L M
X3: A D
X4: D F V Y
PDL1_VH_CDR3.104
CARX1GYYYX2X3X4X5WGQ
X1: D G
X2: A D S Y
X3: F I L M
X4: A D
X5: D F V Y
PDL1_VH_CDR3.105
CARYYGYYX1X2X3X4WGQ
X1: A D S Y
X2: F I L M
X3: A D
X4: D F V Y
PDL1_VH_CDR3.106
CARX1YGYYX2X3X4X5WGQ
X1: D G
X2: A D S Y
X3: F I L M
X4: A D
X5: D F V Y
PDL1_VH_CDR3.107
CARYGGYYX1X2X3X4WGQ
X1: A D S Y
X2: F I L M
X3: A D
X4: D F V Y
PDL1_VH_CDR3.108
CARX1GGYYX2X3X4X5WGQ
X1: D G
X2: A D S Y
X3: F I L M
X4: A D
X5: D F V Y
PDL1_VH_CDR3.109
CARYYYGYX1X2X3X4WGQ
X1: A D S Y
X2: F I L M
X3: A D
X4: D F V Y
PDL1_VH_CDR3.110
CARX1X2X3YX4X5X6DYWGQ
X1: D E Y
X2: D G H R
X3: S Y
X4: S Y
X5: A G
X6: F I L M
PDL1_VH_CDR3.111
CARX1YGYX2X3X4DYWGQ
X1: D E Y
X2: S Y
X3: A G
X4: F I L M
PDL1_VH_CDR3.112
CARX1X2GYX3X4X5DYWGQ
X1: D E Y
X2: D G H R
X3: S Y
X4: A G
X5: F I L M
PDL1_VH_CDR3.113
CARX1YX2X3X4X5X6DYWGQ
X1: D E Y
X2: S Y
X3: D G
X4: S Y
X5: A G
X6: F I L M
PDL1_VH_CDR3.114
CARX1X2X3X4X5X6X7DYWGQ
X1: D E Y
X2: D G H R
X3: S Y
X4: D G
X5: S Y
X6: A G
X7: F I L M
PDL1_VH_CDR3.115
CARX1YGX2X3X4X5DYWGQ
X1: D E Y
X2: D G
X3: S Y
X4: A G
X5: F I L M
PDL1_VH_CDR3.116
CARX1X2GX3X4X5X6DYWGQ
X1: D E Y
X2: D G H R
X3: D G
X4: S Y
X5: A G
X6: F I L M
PDL1_VH_CDR3.117
CARX1YX2YX3YX4DYWGQ
X1: D E Y
X2: S Y
X3: S Y
X4: F I L M
PDL1_VH_CDR3.118
CARX1X2X3YX4YX5DYWGQ
X1: D E Y
X2: D G H R
X3: S Y
X4: S Y
X5: F I L M
PDL1_VH_CDR3.119
CARX1YGYX2YX3DYWGQ
X1: D E Y
X2: S Y
X3: F I L M
PDL1_VH_CDR3.120
CARX1X2GYX3YX4DYWGQ
X1: D E Y
X2: D G H R
X3: S Y
X4: F I L M
PDL1_VH_CDR3.121
CARX1YX2X3X4YX5DYWGQ
X1: D E Y
X2: S Y
X3: D G
X4: S Y
X5: F I L M
PDL1_VH_CDR3.122
CARX1X2X3X4X5YX6DYWGQ
X1: D E Y
X2: D G H R
X3: S Y
X4: D G
X5: S Y
X6: F I L M
PDL1_VH_CDR3.123
CARX1YGX2X3YX4DYWGQ
X1: D E Y
X2: D G
X3: S Y
X4: F I L M
PDL1_VH_CDR3.124
CARX1X2GX3X4YX5DYWGQ
X1: D E Y
X2: D G H R
X3: D G
X4: S Y
X5: F I L M
PDL1_VH_CDR3.125
CARX1YX2YX3X4X5DYWGQ
X1: D E Y
X2: S Y
X3: S Y
X4: A G
X5: F I L M
PDL1_VH_CDR3.126
CARX1X2X3YX4YFX5YWGQ
X1: H P S Y
X2: A D G N S T
X3: D G
X4: A G S T
X5: A D
PDL1_VH_CDR3.127
CARRX1X2YX3YFX4YWGQ
X1: A D G N S T
X2: D G
X3: A G S T
X4: A D
PDL1_VH_CDR3.128
CARX1X2X3RX4YFX5YWGQ
X1: H P S Y
X2: A D G N S T
X3: D G
X4: A G S T
X5: A D
PDL1_VH_CDR3.129
CARRX1X2RX3YFX4YWGQ
X1: A D G N S T
X2: D G
X3: A G S T
X4: A D
PDL1_VH_CDR3.130
CARX1X2X3YX4WFX5YWGQ
X1: H P S Y
X2: A D G N S T
X3: D G
X4: A G S T
X5: A D
PDL1_VH_CDR3.131
CARRX1X2YX3WFX4YWGQ
X1: A D G N S T
X2: D G
X3: A G S T
X4: A D
PDL1_VH_CDR3.132
CARX1X2X3RX4WFX5YWGQ
X1: H P S Y
X2: A D G N S T
X3: D G
X4: A G S T
X5: A D
PDL1_VH_CDR3.133
CARRX1X2RX3WFX4YWGQ
X1: A D G N S T
X2: D G
X3: A G S T
X4: A D
PDL1_VH_CDR3.134
CARX1X2GX3X4X5MDX6WGQ
X1: A D H P S Y
X2: D G H R
X3: S Y
X4: N Y
X5: A D G
X6: D F V Y
PDL1_VH_CDR3.135
CARX1X2GX3X4X5MDX6WGQ
X1: A D H P S Y
X2: D G H R
X3: K N R S
X4: N Y
X5: A D G
X6: D F V Y
PDL1_VH_CDR3.136
CARX1X2X3YX4X5FDYWGQ
X1: A G T D E K N R S
X2: D G N S
X3: G R
X4: S Y
X5: A D H P S Y
PDL1_VH_CDR3.137
CARX1X2X3WX4X5FDYWGQ
X1: A G T D E K N R S
X2: D G N S
X3: G R
X4: S Y
X5: A D H P S Y
PDL1_VH_CDR3.138
CARX1X2X3YX4X5FDYWGQ
X1: A G T D E K N R S
X2: D G N S
X3: G R
X4: D G N S
X5: A D H P S Y
PDL1_VH_CDR3.139
CARX1X2X3WX4X5FDYWGQ
X1: A G T D E K N R S
X2: D G N S
X3: G R
X4: D G N S
X5: A D H P S Y
PDL1_VH_CDR3.140
CARX1YYGX2YYX3DX4WGQ
X1: D G
X2: S Y
X3: F I L M
X4: D F V Y
PDL1_VH_CDR3.141
CARYGYGX1YYX2DX3WGQ
X1: S Y
X2: F I L M
X3: D F V Y
PDL1_VH_CDR3.142
CARX1GYGX2YYX3DX4WGQ
X1: D G
X2: S Y
X3: F I L M
X4: D F V Y
PDL1_VH_CDR3.143
CARYYGGX1YYX2DX3WGQ
X1: S Y
X2: F I L M
X3: D F V Y
PDL1_VH_CDR3.144
CARX1YGGX2YYX3DX4WGQ
X1: D G
X2: S Y
X3: F I L M
X4: D F V Y
PDL1_VH_CDR3.145
CARYGGGX1YYX2DX3WGQ
X1: S Y
X2: F I L M
X3: D F V Y
PDL1_VH_CDR3.146
CARX1GGGX2YYX3DX4WGQ
X1: D G
X2: S Y
X3: F I L M
X4: D F V Y
PDL1_VH_CDR3.147
CARYYYYGYYX1DX2WGQ
X1: F I L M
X2: D F V Y
PDL1_VH_CDR3.148
CARX1YYYGYYX2DX3WGQ
X1: D G
X2: F I L M
X3: D F V Y
PDL1_VH_CDR3.149
CARYGYYGYYX1DX2WGQ
X1: F I L M
X2: D F V Y
PDL1_VH_CDR3.150
CARYYYYX1YYX2DX3WGQ
X1: S Y
X2: F I L M
X3: D F V Y
PDL1_VH_CDR3.151
CARX1GYYGYYX2DX3WGQ
X1: D G
X2: F I L M
X3: D F V Y
PDL1_VH_CDR3.152
CARYYGYGYYX1DX2WGQ
X1: F I L M
X2: D F V Y
PDL1_VH_CDR3.153
CARX1YGYGYYX2DX3WGQ
X1: D G
X2: F I L M
X3: D F V Y
PDL1_VH_CDR3.154
CARYGGYGYYX1DX2WGQ
X1: F I L M
X2: D F V Y
PDL1_VH_CDR3.155
CARX1GGYGYYX2DX3WGQ
X1: D G
X2: F I L M
X3: D F V Y
PDL1_VH_CDR3.156
CARYYYGGYYX1DX2WGQ
X1: F I L M
X2: D F V Y
PDL1_VH_CDR3.157
CARX1YYGGYYX2DX3WGQ
X1: D G
X2: F I L M
X3: D F V Y
PDL1_VH_CDR3.158
CARYGYGGYYX1DX2WGQ
X1: F I L M
X2: D F V Y
PDL1_VH_CDR3.159
CARX1GYGGYYX2DX3WGQ
X1: D G
X2: F I L M
X3: D F V Y
PDL1_VH_CDR3.160
CARYYGGGYYX1DX2WGQ
X1: F I L M
X2: D F V Y
PDL1_VH_CDR3.161
CARX1YYYX2YYX3DX4WGQ
X1: D G
X2: S Y
X3: F I L M
X4: D F V Y
PDL1_VH_CDR3.162
CARX1YGGGYYX2DX3WGQ
X1: D G
X2: F I L M
X3: D F V Y
PDL1_VH_CDR3.163
CARYGGGGYYX1DX2WGQ
X1: F I L M
X2: D F V Y
PDL1_VH_CDR3.164
CARX1GGGGYYX2DX3WGQ
X1: D G
X2: F I L M
X3: D F V Y
PDL1_VH_CDR3.165
CARYYYYX1YX2X3DX4WGQ
X1: S Y
X2: A G
X3: F I L M
X4: D F V Y
PDL1_VH_CDR3.166
CARX1YYYX2YX3X4DX5WGQ
X1: D G
X2: S Y
X3: A G
X4: F I L M
X5: D F V Y
PDL1_VH_CDR3.167
CARYGYYX1YX2X3DX4WGQ
X1: S Y
X2: A G
X3: F I L M
X4: D F V Y
PDL1_VH_CDR3.168
CARX1GYYX2YX3X4DX5WGQ
X1: D G
X2: S Y
X3: A G
X4: F I L M
X5: D F V Y
PDL1_VH_CDR3.169
CARYYGYX1YX2X3DX4WGQ
X1: S Y
X2: A G
X3: F I L M
X4: D F V Y
PDL1_VH_CDR3.170
CARX1YGYX2YX3X4DX5WGQ
X1: D G
X2: S Y
X3: A G
X4: F I L M
X5: D F V Y
PDL1_VH_CDR3.171
CARYGGYX1YX2X3DX4WGQ
X1: S Y
X2: A G
X3: F I L M
X4: D F V Y
PDL1_VH_CDR3.172
CARYGYYX1YYX2DX3WGQ
X1: S Y
X2: F I L M
X3: D F V Y
PDL1_VH_CDR3.173
CARX1GGYX2YX3X4DX5WGQ
X1: D G
X2: S Y
X3: A G
X4: F I L M
X5: D F V Y
PDL1_VH_CDR3.174
CARYYYGX1YX2X3DX4WGQ
X1: S Y
X2: A G
X3: F I L M
X4: D F V Y
PDL1_VH_CDR3.175
CARX1YYGX2YX3X4DX5WGQ
X1: D G
X2: S Y
X3: A G
X4: F I L M
X5: D F V Y
PDL1_VH_CDR3.176
CARYGYGX1YX2X3DX4WGQ
X1: S Y
X2: A G
X3: F I L M
X4: D F V Y
PDL1_VH_CDR3.177
CARX1GYGX2YX3X4DX5WGQ
X1: D G
X2: S Y
X3: A G
X4: F I L M
X5: D F V Y
PDL1_VH_CDR3.178
CARYYGGX I YX2X3DX4WGQ
X1: S Y
X2: A G
X3: F I L M
X4: D F V Y
PDL1_VH_CDR3.179
CARX1YGGX2YX3X4DX5WGQ
X1: D G
X2: S Y
X3: A G
X4: F I L M
X5: D F V Y
PDL1_VH_CDR3.180
CARYGGGX1YX2X3DX4WGQ
X1: S Y
X2: A G
X3: F I L M
X4: D F V Y
PDL1_VH_CDR3.181
CARX1GGGX2YX3X4DX5WGQ
X1: D G
X2: S Y
X3: A G
X4: F I L M
X5: D F V Y
PDL1_VH_CDR3.182
CARYYYYGYX1X2DX3WGQ
X1: A G
X2: F I L M
X3: D F V Y
PDL1_VH_CDR3.183
CARX1GYYX2YYX3DX4WGQ
X1: D G
X2: S Y
X3: F I L M
X4: D F V Y
PDL1_VH_CDR3.184
CARX1YYYGYX2X3DX4WGQ
X1: D G
X2: A G
X3: F I L M
X4: D F V Y
PDL1_VH_CDR3.185
CARYGYYGYX1X2DX3WGQ
X1: A G
X2: F I L M
X3: D F V Y
PDL1_VH_CDR3.186
CARX1GYYGYX2X3DX4WGQ
X1: D G
X2: A G
X3: F I L M
X4: D F V Y
PDL1_VH_CDR3.187
CARYYGYGYX1X2DX3WGQ
X1: A G
X2: F I L M
X3: D F V Y
PDL1_VH_CDR3.188
CARX1YGYGYX2X3DX4WGQ
X1: D G
X2: A G
X3: F I L M
X4: D F V Y
PDL1_VH_CDR3.189
CARYGGYGYX1X2DX3WGQ
X1: A G
X2: F I L M
X3: D F V Y
PDL1_VH_CDR3.190
CARX1GGYGYX2X3DX4WGQ
X1: D G
X2: A G
X3: F I L M
X4: D F V Y
PDL1_VH_CDR3.191
CARYYYGGYX1X2DX3WGQ
X1: A G
X2: F I L M
X3: D F V Y
PDL1_VH_CDR3.192
CARX1YYGGYX2X3DX4WGQ
X1: D G
X2: A G
X3: F I L M
X4: D F V Y
PDL1_VH_CDR3.193
CARYGYGGYX1X2DX3WGQ
X1: A G
X2: F I L M
X3: D F V Y
PDL1_VH_CDR3.194
CARYYGYX1YYX2DX3WGQ
X1: S Y
X2: F I L M
X3: D F V Y
PDL1_VH_CDR3.195
CARX1GYGGYX2X3DX4WGQ
X1: D G
X2: A G
X3: F I L M
X4: D F V Y
PDL1_VH_CDR3.196
CARYYGGGYX1X2DX3WGQ
X1: A G
X2: F I L M
X3: D F V Y
PDL1_VH_CDR3.197
CARX1YGGGYX2X3DX4WGQ
X1: D G
X2: A G
X3: F I L M
X4: D F V Y
PDL1_VH_CDR3.198
CARYGGGGYX1X2DX3WGQ
X1: A G
X2: F I L M
X3: D F V Y
PDL1_VH_CDR3.199
CARX1GGGGYX2X3DX4WGQ
X1: D G
X2: A G
X3: F I L M
X4: D F V Y
PDL1_VH_CDR3.200
CARX1YGYX2YYX3DX4WGQ
X1: D G
X2: S Y
X3: F I L M
X4: D F V Y
PDL1_VH_CDR3.201
CARYGGYX1YYX2DX3WGQ
X1: S Y
X2: F I L M
X3: D F V Y
PDL1_VH_CDR3.202
CARX1GGYX2YYX3DX4WGQ
X1: D G
X2: S Y
X3: F I L M
X4: D F V Y
PDL1_VH_CDR3.203
CARYYYGX1YYX2DX3WGQ
X1: S Y
X2: F I L M
X3: D F V Y
PDL1_VH_CDR3.204
CARX1X2YYGYYX3DX4 WGQ
X1: D G
X2: G R
X3: F I L M
X4: D F V Y
PDL1_VH_CDR3.205
CARX1YGYGYYX2DX3WGQ
X1: D G
X2: F I L M
X3: D F V Y
PDL1_VH_CDR3.206
CARX1X2GYGYYX3DX4WGQ
X1: D G
X2: G R
X3: F I L M
X4: D F V Y
PDL1_VH_CDR3.207
CARX1YYGGYYX2DX3WGQ
X1: D G
X2: F I L M
X3: D F V Y
PDL1_VH_CDR3.208
CARX1X2YGGYYX3DX4WGQ
X1: D G
X2: G R
X3: F I L M
X4: D F V Y
PDL1_VH_CDR3.209
CARX1YGGGYYX2DX3WGQ
X1: D G
X2: F I L M
X3: D F V Y
PDL1_VH_CDR3.210
CARX1X2GGGYYX3DX4WGQ
X1: D G
X2: G R
X3: F I L M
X4: D F V Y
PDL1_VH_CDR3.211
CARX1YYYX2YX3X4DX5WGQ
X1: D G
X2: S Y
X3: A G
X4: F I L M
X5: D F V Y
PDL1_VH_CDR3.212
CARX1X2YYX3YX4X5DX6WGQ
X1: D G
X2: G R
X3: S Y
X4: A G
X5: F I L M
X6: D F V Y
PDL1_VH_CDR3.213
CARX1YGYX2YX3X4DX5WGQ
X1: D G
X2: S Y
X3: A G
X4: F I L M
X5: D F V Y
PDL1_VH_CDR3.214
CARX1YYYX2YYX3DX4WGQ
X1: D G
X2: S Y
X3: F I L M
X4: D F V Y
PDL1_VH_CDR3.215
CARX1X2GYX3YX4X5DX6WGQ
X1: D G
X2: G R
X3: S Y
X4: A G
X5: F I L M
X6: D F V Y
PDL1_VH_CDR3.216
CARX1YYGX2YX3X4DX5WGQ
X1: D G
X2: S Y
X3: A G
X4: F I L M
X5: D F V Y
PDL1_VH_CDR3.217
CARX1X2YGX3YX4X5DX6WGQ
X1: D G
X2: G R
X3: S Y
X4: A G
X5: F I L M
X6: D F V Y
PDL1_VH_CDR3.218
CARX1YGGX2YX3X4DX5WGQ
X1: D G
X2: S Y
X3: A G
X4: F I L M
X5: D F V Y
PDL1_VH_CDR3.219
CARX1X2GGX3YX4X5DX6WGQ
X1: D G
X2: G R
X3: S Y
X4: A G
X5: F I L M
X6: D F V Y
PDL1_VH_CDR3.220
CARX1YYYGYX2X3DX4WGQ
X1: D G
X2: A G
X3: F I L M
X4: D F V Y
PDL1_VH_CDR3.221
CARX1X2YYGYX3X4DX5WGQ
X1: D G
X2: G R
X3: A G
X4: F I L M
X5: D F V Y
PDL_VH_CDR3.222
CARX1YGYGYX2X3DX4WGQ
X1: D G
X2: A G
X3: F I L M
X4: D F V Y
PDL1_VH_CDR3.223
CARX1X2GYGYX3X4DX5WGQ
X1: D G
X2: G R
X3: A G
X4: F I L M
X5: D F V Y
PDL1_VH_CDR3.224
CARX1YYGGYX2X3DX4WGQ
X1: D G
X2: A G
X3: F I L M
X4: D F V Y
PDL1_VH_CDR3.225
CARX1X2YYX3YYX4DX5WGQ
X1: D G
X2: G R
X3: S Y
X4: F I L M
X5: D F V Y
PDL1_VH_CDR3.226
CARX1X2YGGYX3X4DX5WGQ
X1: D G
X2: G R
X3: A G
X4: F I L M
X5: D F V Y
PDL1_VH_CDR3.227
CARX1YGGGYX2X3DX4WGQ
X1: D G
X2: A G
X3: F I L M
X4: D F V Y
PDL1_VH_CDR3.228
CARX1X2GGGYX3X4DX5WGQ
X1: D G
X2: G R
X3: A G
X4: F I L M
X5: D F V Y
PDL1_VH_CDR3.229
CARX1YGYX2YYX3DX4WGQ
X1: D G
X2: S Y
X3: F I L M
X4: D F V Y
PDL1_VH_CDR3.230
CARX1X2GYX3YYX4DX5WGQ
X1: D G
X2: G R
X3: S Y
X4: F I L M
X5: D F V Y
PDL1_VH_CDR3.231
CARX1YYGX2YYX3DX4WGQ
X1: D G
X2: S Y
X3: F I L M
X4: D F V Y
PDL1_VH_CDR3.232
CARX1X2YGX3YYX4DX5WGQ
X1: D G
X2: G R
X3: S Y
X4: F I L M
X5: D F V Y
PDL1_VH_CDR3.233
CARX1YGGX2YYX3DX4WGQ
X1: D G
X2: S Y
X3: F I L M
X4: D F V Y
PDL1_VH_CDR3.234
CARX1X2GGX3YYX4DX5WGQ
X1: D G
X2: G R
X3: S Y
X4: F I L M
X5: D F V Y
PDL1_VH_CDR3.235
CARX1YYYGYYX2DX3WGQ
X1: D G
X2: F I L M
X3: D F V Y
PDL1_VHSDR3.236
CARGX1X2X3X4YX5X6DX7WGQ
X1: D G H R
X2: S Y
X3: F L Y
X4: S Y
X5: A D S Y
X6: F I L M
X7: D F V Y
PDL1_VH_CDR3.237
CARGX1RX2X3YX4X5DX6WGQ
X1: D G H R
X2: F L Y
X3: S Y
X4: A D S Y
X5: F I L M
X6: D F V Y
PDL1_VH_CDR3.238
CARGX1X2GX3YX4X5DX6WGQ
X1: D G H R
X2: S Y
X3: S Y
X4: A D S Y
X5: F I L M
X6: D F V Y
PDL1_VH_CDR3.239
CARGX1RGX2YX3X4DX5WGQ
X1: D G H R
X2: S Y
X3: A D S Y
X4: F I L M
X5: D F V Y
PDL1_VH_CDR3.240
CARGX1X2X3X4WX5X6DX7WGQ
X1: D G H R
X2: S Y
X3: F L Y
X4: S Y
X5: A D S Y
X6: F I L M
X7: D F V Y
PDL1_VH_CDR3.241
CARGX1RX2X3WX4X5DX6WGQ
X1: D G H R
X2: F L Y
X3: S Y
X4: A D S Y
X5: F I L M
X6: D F V Y
PDL1_VH_CDR3.242
CARGX1X2GX3WX4X5DX6WGQ
X1: D G H R
X2: S Y
X3: S Y
X4: A D S Y
X5: F I L M
X6: D F V Y
PDL1_VH_CDR3.243
CARGX1RGX2WX3X4DX5WGQ
X1: D G H R
X2: S Y
X3: A D S Y
X4: F I L M
X5: D F V Y
PDL1_VH_CDR3.244
CARX1X2YYX3X4X5FX6YWGQ
X1: S Y
X2: D Y
X3: D G N S
X4: G S
X5: H P S Y
X6: A D
PDL1_VH_CDR3.245
CARGX1YYX2X3X4FX5YWGQ
X1: D Y
X2: D G N S
X3: G S
X4: H P S Y
X5: A D
PDL1_VH_CDR3.246
CARX1X2YGX3X4X5FX6YWGQ
X1: S Y
X2: D Y
X3: D G N S
X4: G S
X5: F I P S Y
X6: A D
PDL1_VH_CDR3.247
CARGX1YGX2X3X4FX5YWGQ
X1: D Y
X2: D G N S
X3: G S
X4: H P S Y
X5: A D
PDL1_VH_CDR3.248
CARX1X2YYX3X4GFX5YWGQ
X1: S Y
X2: D Y
X3: D G N S
X4: G S
X5: A D
PDL1_VH_CDR3.249
CARGX1YYX2X3GFX4YWGQ
X1: D Y
X2: D G N S
X3: G S
X4: A D
PDL1_VH_CDR3.250
CARX1X2YGX3X4GFX5YWGQ
X1: S Y
X2: D Y
X3: D G N S
X4: G S
X5: A D
PDL1_VH_CDR3.251
CARGX1YGX2X3GFX4YWGQ
X1: D Y
X2: D G N S
X3: G S
X4: A D
PDL1_VH_CDR3.252
CARX1X2YYX3X4X5X6DYWGQ
X1: D G
X2: A G P R
X3: S Y
X4: D G N S
X5: A G P R
X6: F I L M
PDL1_VH_CDR3.253
CARYX1YGX2X3X4X5DYWGQ
X1: A G P R
X2: S Y
X3: D G N S
X4: A G P R
X5: F I L M
PDL1_VH_CDR3.254
CARX1X2YGX3X4X5X6DYWGQ
X1: D G
X2: A G P R
X3: S Y
X4: D G N S
X5: A G P R
X6: F I L M
PDL1_VH_CDR3.255
CARYX1YYGX2X3X4DYWGQ
X1: A G P R
X2: D G N S
X3: A G P R
X4: F I L M
PDL1_VH_CDR3.256
CARX1X2YYGX3X4X5DYWGQ
X1: D G
X2: A G P R
X3: D G N S
X4: A G P R
X5: F I L M
PDL1_VH_CDR3.257
CARYX1YGGX2X3X4DYWGQ
X1: A G P R
X2: D G N S
X3: A G P R
X4: F I L M
PDL1_VH_CDR3.258
CARX1X2YGGX3X4X5DYWGQ
X1: D G
X2: A G P R
X3: D G N S
X4: A G P R
X5: F I L M
PDL1_VH_CDR3.259
CARYX1YYX2X3X4X5DYWGQ
X1: A G P R
X2: S Y
X3: D G N S
X4: H Y
X5: F I L M
PDL1_VH_CDR3.260
CARX1X2YYX3X4X5X6DYWGQ
X1: D G
X2: A G P R
X3: S Y
X4: D G N S
X5: H Y
X6: F I L M
PDL1_VH_CDR3.261
CARYX1YGX2X3 X4X5DYWGQ
X1: A G P R
X2: S Y
X3: D G N S
X4: H Y
X5: F I L M
PDL1_VH_CDR3.262
CARX1X2YGX3X4X5X6DYWGQ
X1: D G
X2: A G P R
X3: S Y
X4: D G N S
X5: H Y
X6: F I L M
PDL1_VH_CDR3.263
CARYX1YYGX2X3X4DYWGQ
X1: A G P R
X2: D G N S
X3: H Y
X4: F I L M
PDL1_VH_CDR3.264
CARX1X2YYGX3X4X5DYWGQ
X1: D G
X2: A G P R
X3: D G N S
X4: H Y
XS: F I L M
PDL1_VH_CDR3.265
CARYX1YGGX2X3X4DYWGQ
X1: A G P R
X2: D G N S
X3: H Y
X4: F I L M
PDL1_VH_CDR3.266
CARX1X2YGGX3X4X5DYWGQ
X1: D G
X2: A G P R
X3: D G N S
X4: H Y
X5: F I L M
PDL1_VH_CDR3.267
CARYX1YYX2X3X4X5DYWGQ
X1: A G P R
X2: S Y
X3: D G N S
X4: A G P R
X5: F I L M
PDL1_VH_CDR3.268
CARX1YYYGX2X3GX4YWGQ
X1: E G
X2: A S
X3: S Y
X4: A D
PDL1_VH_CDR3.269
CARX1X2YYGX3X4GX5YWGQ
X1: S Y
X2: D G N S
X3: A S
X4: S Y
X5: A D
PDL1_VH_CDR3.270
CARX1X2YYGX3X4GX5YWGQ
X1: E G
X2: D G N S
X3: A S
X4: S Y
X5: A D
PDL1_VH_SDR3.271
CARX1YYYGX2X3GX4YWGQ
X1: S Y
X2: A S
X3: G R W
X4: A D
PDL1_VH_CDR3.272
CARX1YYYGX2X3GX4YWGQ
X1: E G
X2: A S
X3: G R W
X4: A D
PDL1_VH_CDR3.273
CARX1X2YYGX3X4GX5YWGQ
X1: S Y
X2: D G N S
X3: A S
X4: G R W
X5: A D
PDL1_VH_CDR3.274
CARX I X2YYGX3X4GX5YWGQ
X1: E G
X2: D G N S
X3: A S
X4: G R W
X5: A D
PDL1_VH_CDR3.275
CARX1YYYGX2X3X4X5YWGQ
X1: S Y
X2: A S
X3: S Y
X4: F S
X5: A D
PDL1_VH_CDR3.276
CARX1YYYGX2X3X4X5YWGQ
X1: E G
X2: A S
X3: S Y
X4: F S
X5: A D
PDL1_VH_CDR3.277
CARX1X2YYGX3X4X5X6YWGQ
X1: S Y
X2: D G N S
X3: A S
X4: S Y
X5: F S
X6: A D
PDL1_VH_CDR3.278
CARX1X2YYGX3X4X5X6YWGQ
X1: E G
X2: D G N S
X3: A S
X4: S Y
X5: F S
X6: A D
PDL1_VH_CDR3.279
CARX1YYYGX2X3X4X5YWGQ
X1: S Y
X2: A S
X3: G R W
X4: F S
X5: A D
PDL1_VH_CDR3.280
CARX1YYYGX2X3X4X5YWGQ
X1: E G
X2: A S
X3: G R W
X4: F S
X5: A D
PDL1_VH_CDR3.281
CARX1X2YYGX3X4X5X6YWGQ
X1: S Y
X2: D G N S
X3: A S
X4: G R W
X5: F S
X6: A D
PDL1_VH_CDR3.282
CARX1X2YYGX3X4X5X6YWGQ
X1: E G
X2: D G N S
X3: A S
X4: G R W
X5: F S
X6: A D
PDL1_VH_CDR3.283
CARX1YYYGX2X3GX4YWGQ
X1: S Y
X2: A S
X3: S Y
X4: A D
PDL1_VH_CDR3.284
CARX1X2X3X4YYX5X6DYWGQ
X1: G D E K N R S
X2: H P S Y
X3: F H L P S Y
X4: S Y
X5: A G
X6: F I L M
PDL1_VH_CDR3.285
CARX1GX2X3YYX4X5DYWGQ
X1: G D E K N R S
X2: F H L P S Y
X3: S Y
X4: A G
X5: F I L M
PDL1_VH_CDR3.286
CARX1X2X3X4YX5X6X7DYWGQ
X1: G D E K N R S
X2: H P S Y
X3: F H L P S Y
X4: S Y
X5: D G
X6: A G
X7: F I L M
PDL1_VH_CDR3.287
CARX1GX2X3YX4X5X6DYWGQ
X1: G D E K N R S
X2: F H L P S Y
X3: S Y
X4: D G
X5: A G
X6: F I L M
PDL1_VH_CDR3.288
CARGYX1YX2WYX3DX4WGQ
X1: S Y
X2: S Y
X3: F I L M
X4: D F V Y
PDL1_VH_CDR3.289
CARYRX1YX2WYX3DX4WGQ
X1: S Y
X2: S Y
X3: F I L M
X4: D F V Y
PDL1_VH_CDR3.290
CARGRX1YX2WYX3DX4WGQ
X1: S Y
X2: S Y
X3: F I L M
X4: D F V Y
PDL1_VH_CDR3.291
CARYYX1GX2WYX3DX4WGQ
X1: S Y
X2: S Y
X3: F I L M
X4: D F V Y
PDL1_VH_CDR3.292
CARGYX1GX2WYX3DX4WGQ
X1: S Y
X2: S Y
X3: F I L M
X4: D F V Y
PDL1_VH_CDR3.293
CARYRX1GX2WYX3DX4WGQ
X1: S Y
X2: S Y
X3: F I L M
X4: D F V Y
PDL1_VH_CDR3.294
CARGRX1GX2WYX3DX4WGQ
X1: S Y
X2: S Y
X3: F I L M
X4: D F V Y
PDL1_VH_CDR3.295
CARYYX I YX2YX3X4DX5WGQ
X1: S Y
X2: S Y
X3: A G
X4: F I L M
X5: D F V Y
PDL1_VH_CDR3.296
CARGYX1YX2YX3X4DX5WGQ
X1: S Y
X2: S Y
X3: A G
X4: F I L M
X5: D F V Y
PDL1_VH_CDR3.297
CARYRX1YX2YX3X4DX5WGQ
X1: S Y
X2: S Y
X3: A G
X4: F I L M
X5: D F V Y
PDL1_VH_CDR3.298
CARYYX1YX2YYX3DX4WGQ
X1: S Y
X2: S Y
X3: F I L M
X4: D F V Y
PDL1_VH_CDR3.299
CARGRX1YX2YX3X4DX5WGQ
X1: S Y
X2: S Y
X3: A G
X4: F I L M
X5: D F V Y
PDL1_VH_CDR3.300
CARYYX1GX2YX3X4DX5WGQ
X1: S Y
X2: S Y
X3: A G
X4: F I L M
X5: D F V Y
PDL1_VH_CDR3.301
CARGYX1GX2YX3X4DX5WGQ
X1: S Y
X2: S Y
X3: A G
X4: F I L M
X5: D F V Y
PDL1_VH_CDR3.302
CARYRX1GX2YX3X4DX5WGQ
X1: S Y
X2: S Y
X3: A G
X4: F I L M
X5: D F V Y
PDL1_VH_CDR3.303
CARGRX1GX2YX3X4DX5WGQ
X1: S Y
X2: S Y
X3: A G
X4: F I L M
X5: D F V Y
PDL1_VH_CDR3.304
CARYYX1YX2WX3X4DX5WGQ
X1: S Y
X2: S Y
X3: A G
X4: F I L M
X5: D F V Y
PDL1_VH_CDR3.305
CARGYX1YX2WX3X4DX5WGQ
X1: S Y
X2: S Y
X3: A G
X4: F I L M
X5: D F V Y
PDL1_VH_CDR3.306
CARYRX1YX2WX3X4DX5WGQ
X1: S Y
X2: S Y
X3: A G
X4: F I L M
X5: D F V Y
PDL1_VH_CDR3.307
CARGRX1YX2WX3X4DX5WGQ
X1: S Y
X2: S Y
X3: A G
X4: F I L M
X5: D F V Y
PDL1_VH_CDR3.308
CARYYX1GX2WX3X4DX5WGQ
X1: S Y
X2: S Y
X3: A G
X4: F I L M
X5: D F V Y
PDL1_VH_CDR3.309
CARGYX I YX2YYX3DX4WGQ
X1: S Y
X2: S Y
X3: F I L M
X4: D F V Y
PDL1_VH_CDR3.310
CARGYX1GX2WX3X4DX5WGQ
X1: S Y
X2: S Y
X3: A G
X4: F I L M
X5: D F V Y
PDL1_VH_CDR3.311
CARYRX1GX2WX3X4DX5WGQ
X1: S Y
X2: S Y
X3: A G
X4: F I L M
X5: D F V Y
PDL1_VH_CDR3.312
CARGRX1GX2WX3X4DX5WGQ
X1: S Y
X2: S Y
X3: A G
X4: F I L M
X5: D F V Y
PDL1_VH_CDR3.313
CARYRX 1YX2YYX3DX4WGQ
X1: S Y
X2: S Y
X3: F I L M
X4: D F V Y
PDL1_VH_CDR3.314
CARGRX1YX2YYX3DX4WGQ
X1: S Y
X2: S Y
X3: F I L M
X4: D F V Y
PDL1_VH_CDR3.315
CARYYX1GX2YYX3DX4WGQ
X1: S Y
X2: S Y
X3: F I L M
X4: D F V Y
PDL1_VH_CDR3.316
CARGYX1GX2YYX3DX4WGQ
X1: S Y
X2: S Y
X3: F I L M
X4: D F V Y
PDL1_VH_CDR3.317
CARYRX1GX2YYX3DX4WGQ
X1: S Y
X2: S Y
X3: F I L M
X4: D F V Y
PDL1_VH_CDR3.318
CARGRX1GX2YYX3DX4WGQ
X1: S Y
X2: S Y
X3: F I L M
X4: D F V Y
PDL1_VH_CDR3.319
CARYYX1YX2WYX3DX4WGQ
X1: S Y
X2: S Y
X3: F I L M
X4: D F V Y
PDL1_VH_CDR3.320
CARX 1X2X3X4X5YX6X7DYWGQ
X1: H Y
X2: S Y
X3: S Y
X4: D G N S
X5: H P S Y
X6: A D S Y
X7: F I L M
PDL1_VH_CDR3.321
CARX1GX2X3X4YX5X6DYWGQ
X1: H Y
X2: S Y
X3: D G N S
X4: H P S Y
X5: A D S Y
X6: F I L M
PDL1_VH_CDR3.322
CARX1X2GX3X4YX5X6DYWGQ
X1: H Y
X2: S Y
X3: D G N S
X4: H P S Y
X5: A D S Y
X6: F I L M
PDL1_VH_CDR3.323
CARX1GGX2X3YX4X5DYWGQ
X1: H Y
X2: D G N S
X3: H P S Y
X4: A D S Y
X5: F I L M
PDL1_VH_CDR3.324
CARX1X2X3X4GYX5X6DYWGQ
X1: H Y
X2: S Y
X3: S Y
X4: D G N S
X5: A D S Y
X6: F I L M
PDL1_VH_CDR3.325
CARX1GX2X3GYX4X5DYWGQ
X1: H Y
X2: S Y
X3: D G N S
X4: A D S Y
X5: F I L M
PDL1_VH_CDR3.326
CARX1X2GX3GYX4X5DYWGQ
X1: H Y
X2: S Y
X3: D G N S
X4: A D S Y
X5: F I L M
PDL1_VH_CDR3.327
CARX1GGX2GYX3X4DYWGQ
X1: H Y
X2: D G N S
X3: A D S Y
X4: F I L M
PDL1_VH_CDR3.328
CARX1GGYX2GYYX3DX4WGQ
X1: D G
X2: S Y
X3: F I L M
X4: D F V Y
PDL1_VH_CDR3.329
CARX1GYGX2GYYX3DX4WGQ
X1: D G
X2: S Y
X3: F I L M
X4: D F V Y
PDL1_VH_CDR3.330
CARX1GGGX2GYYX3DX4WGQ
X1: D G
X2: S Y
X3: F I L M
X4: D F V Y
PDL1_VH_CDR3.331
CARX1GYYGGYYX2DX3WGQ
X1: D G
X2: F I L M
X3: D F V Y
PDL1_VH_CDR3.332
CARX1GGYGGYYX2DX3WGQ
X1: D G
X2: F I L M
X3: D F V Y
PDL1_VH_CDR3.333
CARX1GYGGGYYX2DX3WGQ
X1: D G
X2: F I L M
X3: D F V Y
PDL1_VH_CDR3.334
CARX1GGGGGYYX2DX3WGQ
X1: D G
X2: F I L M
X3: D F V Y
PDL1_VH_CDR3.335
CARX1GYYX2X3YX4X5DX6WGQ
X1: D G
X2: S Y
X3: S Y
X4: A G
X5: F I L M
X6: D F V Y
PDL1_VH_CDR3.336
CARX1GGYX2X3YX4X5DX6WGQ
X1: D G
X2: S Y
X3: S Y
X4: A G
X5: F I L M
X6: D F V Y
PDL1_VH_CDR3.337
CARX1GYGX2X3YX4X5DX6WGQ
X1: D G
X2: S Y
X3: S Y
X4: A G
X5: F I L M
X6: D F V Y
PDL1_VH_CDR3.338
CARX1GYYX2X3YYX4DX5WGQ
X1: D G
X2: S Y
X3: S Y
X4: F I L M
X5: D F V Y
PDL1_VH_CDR3.339
CARX1GGGX2X3YX4X5DX6WGQ
X1: D G
X2: S Y
X3: S Y
X4: A G
X5: F I L M
X6: D F V Y
PDL1_VH_CDR3.340
CARX1GYYGX2YX3X4DX5WGQ
X1: D G
X2: S Y
X3: A G
X4: F I L M
X5: D F V Y
PDL1_VH_CDR3.341
CARX1GGYGX2YX3X4DX5WGQ
X1: D G
X2: S Y
X3: A G
X4: F I L M
X5: D F V Y
PDL1_VH_CDR3.342
CARX1GYGGX2YX3X4DX5WGQ
X1: D G
X2: S Y
X3: A G
X4: F I L M
X5: D F V Y
PDL1_VH_CDR3.343
CARX1GGGGX2YX3X4DX5WGQ
X1: D G
X2: S Y
X3: A G
X4: F I L M
X5: D F V Y
PDL1_VH_CDR3.344
CARX1GYYX2GYX3X4DX5WGQ
X1: D G
X2: S Y
X3: A G
X4: F I L M
X5: D F V Y
PDL1_VH_CDR3.345
CARX1GGYX2GYX3X4DX5WGQ
X1: D G
X2: S Y
X3: A G
X4: F I L M
X5: D F V Y
PDL1_VH_CDR3.346
CARX1GYGX2GYX3X4DX5WGQ
X1: D G
X2: S Y
X3: A G
X4: F I L M
X5: D F V Y
PDL1_VH_CDR3.347
CARX1GGGX2GYX3X4DX5WGQ
X1: D G
X2: S Y
X3: A G
X4: F I L M
X5: D F V Y
PDL1_VH_CDR3.348
CARX1GYYGGYX2X3DX4WGQ
X1: D G
X2: A G
X3: F I L M
X4: D F V Y
PDL1_VH_CDR3.349
CARX1GGYX2X3YYX4DX5WGQ
X1: D G
X2: S Y
X3: S Y
X4: F I L M
X5: D F V Y
PDL1_VH_CDR3.350
CARX1GGYGGYX2X3DX4WGQ
X1: D G
X2: A G
X3: F I L M
X4: D F V Y
PDL1_VH_CDR3.351
CARX1GYGGGYX2X3DX4WGQ
X1: D G
X2: A G
X3: F I L M
X4: D F V Y
PDL1_VH_CDR3.352
CARX1GGGGGYX2X3DX4WGQ
X1: D G
X2: A G
X3: F I L M
X4: D F V Y
PDL1_VH_CDR3.353
CARX1GYGX2X3YYX4DX5WGQ
X1: D G
X2: S Y
X3: S Y
X4: F I L M
X5: D F V Y
PDL1_VH_CDR3.354
CARX1GGGX2X3YYX4DX5WGQ
X1: D G
X2: S Y
X3: S Y
X4: F I L M
X5: D F V Y
PDL1_VH_CDR3.355
CARX1GYYGX2YYX3DX4WGQ
X1: D G
X2: S Y
X3: F I L M
X4: D F V Y
PDL1_VH_CDR3.356
CARX1GGYGX2YYX3DX4WGQ
X1: D G
X2: S Y
X3: F I L M
X4: D F V Y
PDL1_VH_CDR3.357
CARX1GYGGX2YYX3DX4WGQ
X1: D G
X2: S Y
X3: F I L M
X4: D F V Y
PDL1_VH_CDR3.358
CARX1GGGGX2YYX3DX4WGQ
X1: D G
X2: S Y
X3: F I L M
X4: D F V Y
PDL1_VH_CDR3.359
CARX1GYYX2GYYX3DX4WGQ
X1: D G
X2: S Y
X3: F I L M
X4: D F V Y
PDL1_VH_CDR3.360
CARX1GYX2YGX3X4X5DYWGQ
X1: D G
X2: S Y
X3: S Y
X4: A D S Y
X5: F I L M
PDL1_VH_CDR3.361
CARX1YGX2YGX3X4X5DYWGQ
X1: D G
X2: S Y
X3: S Y
X4: A D S Y
X5: F I L M
PDL1_VH_CDR3.362
CARX1GGX2YGX3X4X5DYWGQ
X1: D G
X2: S Y
X3: S Y
X4: A D S Y
X5: F I L M
PDL1_VH_CDR3.363
CARX1YYX2GGX3X4X5DYWGQ
X1: D G
X2: S Y
X3: S Y
X4: A D S Y
X5: F I L M
PDL1_VH_CDR3.364
CARX1GYX2GGX3X4X5DYWGQ
X1: D G
X2: S Y
X3: S Y
X4: A D S Y
X5: F I L M
PDL1_VH_CDR3.365
CARX1YGX2GGX3X4X5DYWGQ
X1: D G
X2: S Y
X3: S Y
X4: A D S Y
X5: F I L M
PDL1_VH_CDR3.366
CARX1GGX2GGX3X4X5DYWGQ
X1: D G
X2: S Y
X3: S Y
X4: A D S Y
X5: F I L M
PDL1_VH_CDR3.367
CARX1YYX2YX3X4X5X6DYWGQ
X1: D G
X2: S Y
X3: S Y
X4: S Y
X5: A D S Y
X6: F I L M
PDL1_VH_CDR3.368
CARX1GYX2YX3X4X5X6DYWGQ
X1: D G
X2: S Y
X3: S Y
X4: S Y
X5: A D S Y
X6: F I L M
PDL1_VH_CDR3.369
CARX1YGX2YX3X4X5X6DYWGQ
X1: D G
X2: S Y
X3: S Y
X4: S Y
X5: A D S Y
X6: F I L M
PDL1_VH_CDR3.370
CARX1GGX2YX3X4X5X6DYWGQ
X1: D G
X2: S Y
X3: S Y
X4: S Y
X5: A D S Y
X6: F I L M
PDL1_VH_CDR3.371
CARX1YYX2GX3X4X5X6DYWGQ
X1: D G
X2: S Y
X3: S Y
X4: S Y
X5: A D S Y
X6: F I L M
PDL1_VH_CDR3.372
CARX1GYX2GX3X4X5X6DYWGQ
X1: D G
X2: S Y
X3: S Y
X4: S Y
X5: A D S Y
X6: F I L M
PDL1_VH_CDR3.373
CARX1YGX2GX3X4X5X6DYWGQ
X1: D G
X2: S Y
X3: S Y
X4: S Y
X5: A D S Y
X6: F I L M
PDL1_VH_CDR3.374
CARX1GGX2GX3X4X5X6DYWGQ
X1: D G
X2: S Y
X3: S Y
X4: S Y
X5: A D S Y
X6: F I L M
PDL1_VH_CDR3.375
CARX1YYX2YGX3X4X5DYWGQ
X1: D G
X2: S Y
X3: S Y
X4: A D S Y
X5: F I L M
PDL1_VH_CDR3.376
CARX1GYX2YX3YX4X5DX6WGQ
X1: D G
X2: S Y
X3: S Y
X4: A G
X5: F I L M
X6: D F V Y
PDL1_VH_CDR3.377
CARX1YGX2YX3YX4X5DX6WGQ
X1: D G
X2: S Y
X3: S Y
X4: A G
X5: F I L M
X6: D F V Y
PDL1_VH_CDR3.378
CARX1GGX2YX3YX4X5DX6WGQ
X1: D G
X2: S Y
X3: S Y
X4: A G
X5: F I L M
X6: D F V Y
PDL1_VH_CDR3.379
CARX1YYX2GX3YX4X5DX6WGQ
X1: D G
X2: S Y
X3: S Y
X4: A G
X5: F I L M
X6: D F V Y
PDL1_VH_CDR3.380
CARX1GYX2GX3YX4X5DX6WGQ
X1: D G
X2: S Y
X3: S Y
X4: A G
X5: F I L M
X6: D F V Y
PDL1_VH_CDR3.381
CARX1YGX2GX3YX4X5DX6WGQ
X1: D G
X2: S Y
X3: S Y
X4: A G
X5: F I L M
X6: D F V Y
PDL1_VH_CDR3.382
CARX1GGX2GX3YX4X5DX6WGQ
X1: D G
X2: S Y
X3: S Y
X4: A G
X5: F I L M
X6: D F V Y
PDL1_VH_CDR3.383
CARX1YYX2YX3YYX4DX5WGQ
X1: D G
X2: S Y
X3: S Y
X4: F I L M
X5: D F V Y
PDL1_VH_CDR3.384
CARX1GYX2YX3YYX4DX5WGQ
X1: D G
X2: S Y
X3: S Y
X4: F I L M
X5: D F V Y
PDL1_PDL1CDR3.385
CARX1YGX2YX3YYX4DX5WGQ
X1: D G
X2: S Y
X3: S Y
X4: F I L M
X5: D F V Y
PDL1_VH_CDR3.386
CARX1GGX2YX3YYX4DX5WGQ
X1: D G
X2: S Y
X3: S Y
X4: F I L M
X5: D F V Y
PDL1_VH_CDR3.387
CARX1YYX2GX3YYX4DX5WGQ
X1: D G
X2: S Y
X3: S Y
X4: F I L M
X5: D F V Y
PDL1_VH_CDR3.388
CARX1GYX2GX3YYX4DX5WGQ
X1: D G
X2: S Y
X3: S Y
X4: F I L M
X5: D F V Y
PDL1_VH_CDR3.389
CARX1YGX2GX3YYX4DX5WGQ
X1: D G
X2: S Y
X3: S Y
X4: F I L M
X5: D F V Y
PDL1_VH_CDR3.390
CARX1GGX2GX3YYX4DX5WGQ
X1: D G
X2: S Y
X3: S Y
X4: F I L M
X5: D F V Y
PDL1_VH_CDR3.391
CARX1YYX2YX3YX4X5DX6WGQ
X1: D G
X2: S Y
X3: S Y
X4: A G
X5: F I L M
X6: D F V Y
PDL1_VH_CDR3.392
CARDX1X2YYX3X4X5X6DX7WGQ
X1: D G
X2: S Y
X3: S Y
X4: S Y
X5: A D S Y
X6: F I L M
X7: D F V Y
PDL1_VH_CDR3.393
CARDX1X2GYX3X4X5X6DX7WGQ
X1: D G
X2: S Y
X3: S Y
X4: S Y
X5: A D S Y
X6: F I L M
X7: D F V Y
PDL1_VH_CDR3.394
CARDX1X2YGX3X4X5X6DX7WGQ
X1: D G
X2: S Y
X3: S Y
X4: S Y
X5: A D S Y
X6: F I L M
X7: D F V Y
PDL1_VH_CDR3.395
CARDX1X2GGX3X4X5X6DX7WGQ
X1: D G
X2: S Y
X3: S Y
X4: S Y
X5: A D S Y
X6: F I L M
X7: D F V Y
PDL1_VH_CDR3.396
CARX1X2X3YX4X5X6X7X8DYWGQ
X1: D G N S
X2: H Y
X3: S Y
X4: S Y
X5: S Y
X6: S Y
X7: A D S Y
X8: F I L M
PDL1_VH_CDR3.397
CARX1X2X3YGX4X5X6X7DYWGQ
X1: D G N S
X2: H Y
X3: S Y
X4: S Y
X5: S Y
X6: A D S Y
X7: F I L M
PDL1_VH_CDR3.398
CARX1X2X3YX4GX5X6X7DYWGQ
X1: D G N S
X2: H Y
X3: S Y
X4: S Y
X5: S Y
X6: A D S Y
X7: F I L M
PDL1_VH_CDR3.399
CARX1X2X3YGGX4X5X6DYWGQ
X1: D G N S
X2: H Y
X3: S Y
X4: S Y
X5: A D S Y
X6: F I L M
PDL1_VH_CDR3.400
CARYX1YX2X3X4X5YX6DYWGQ
X1: N S T Y
X2: S Y
X3: S Y
X4: D G N S
X5: S Y
X6: F I L M
PDL1_VH_CDR3.401
CARGX1YX2X3 X4X5YX6DYWGQ
X1: N S T Y
X2: S Y
X3: S Y
X4: D G N S
X5: S Y
X6: F I L M
PDL1_VH_CDR3.402
CARYX1YX2X3X4X5YX6DYWGQ
X1: N S T Y
X2: D G
X3: S Y
X4: D G N S
X5: S Y
X6: F I L M
PDL1_VH_CDR3.403
CARGX1YX2X3X4X5YX6DYWGQ
X1: N S T Y
X2: D G
X3: S Y
X4: D G N S
X5: S Y
X6: F I L M
PDL1_VH_CDR3.404
CARYX1YX2GX3X4YX5DYWGQ
X1: N S T Y
X2: S Y
X3: D G N S
X4: S Y
X5: F I L M
PDL1_VH_CDR3.405
CARGX1YX2GX3X4YX5DYWGQ
X1: N S T Y
X2: S Y
X3: D G N S
X4: S Y
X5: F I L M
PDL1_VH_CDR3.406
CARYX1YX2GX3X4YX5DYWGQ
X1: N S T Y
X2: D G
X3: D G N S
X4: S Y
X5: F I L M
PDL1_VH_CDR3.407
CARGX1YX2GX3X4YX5DYWGQ
X1: N S T Y
X2: D G
X3: D G N S
X4: S Y
X5: F I L M
PDL1_VH_CDR3.408
CARDX1X2GYYX3X4X5X6YWGQ
X1: D G H R
X2: D G N S
X3: A S D E Y
X4: A D S Y
X5: F I L M
X6: A D
PDL1_VH_CDR3.409
CARX1X2X3X4X5GYX6X7DYWGQ
X1: A E G P Q R
X2: L V
X3: D F H L V Y
X4: G R
X5: A G L P R V
X6: A D N S T Y
X7: F I L M
PDL1_VH_CDR3.410
CARX1X2X3YYX4YX5X6DX7WGQ
X1: D G
X2: D G H R
X3: G S
X4: F S Y
X5: A D G
X6: F I L M
X7: D F V Y
PDL1_VH_CDR3.411
CARDX1YGX2YX3YX4X5DX6WGQ
X1: G R
X2: S Y
X3: S Y
X4: A G
X5: F I L M
X6: D F V Y
PDL1_VH_CDR3.412
CARDX1YYGYX2YX3X4DX5WGQ
X1: G R
X2: S Y
X3: A G
X4: F I L M
X5: D F V Y
PDL1_VH_CDR3.413
CARDX1YGGYX2YX3X4DX5WGQ
X1: G R
X2: S Y
X3: A G
X4: F I L M
X5: D F V Y
PDL1_VH_CDR3.414
CARDX1YYX2GX3YX4X5DX6WGQ
X1: G R
X2: S Y
X3: S Y
X4: A G
X5: F I L M
X6: D F V Y
PDL1_VH_CDR3.415
CARDX1YGX2GX3YX4X5DX6WGQ
X1: G R
X2: S Y
X3: S Y
X4: A G
X5: F I L M
X6: D F V Y
PDL1_VH_CDR3.416
CARDX1YYGGX2YX3X4DX5WGQ
X1: G R
X2: S Y
X3: A G
X4: F I L M
X5: D F V Y
PDL1_VH_CDR3.417
CARDX1YGGGX2YX3X4DX5WGQ
X1: G R
X2: S Y
X3: A G
X4: F I L M
X5: D F V Y
PDL1_VH_CDR3.418
CARDX1YYX2YX3YYX4DX5WGQ
X1: G R
X2: S Y
X3: S Y
X4: F I L M
X5: D F V Y
PDL1_VH_CDR3.419
CARDX1YGX2YX3YYX4DX5WGQ
X1: G R
X2: S Y
X3: S Y
X4: F I L M
X5: D F V Y
PDL1_VH_CDR3.420
CARDX1YYGYX2YYX3DX4WGQ
X1: G R
X2: S Y
X3: F I L M
X4: D F V Y
PDL1_VH_CDR3.421
CARDX1YGGYX2YYX3DX4WGQ
X1: G R
X2: S Y
X3: F I L M
X4: D F V Y
PDL1_VH_CDR3.422
CARDX1YYX2GX3YYX4DX5WGQ
X1: G R
X2: S Y
X3: S Y
X4: F I L M
X5: D F V Y
PDL1_VH_CDR3.423
CARDX1YGX2GX3YYX4DX5WGQ
X1: G R
X2: S Y
X3: S Y
X4: F I L M
X5: D F V Y
PDL1_VH_CDR3.424
CARDX1YYGGX2YYX3DX4WGQ
X1: G R
X2: S Y
X3: F I L M
X4: D F V Y
PDL1_VH_CDR3.425
CARDX1YGGGX2YYX3DX4WGQ
X1: G R
X2: S Y
X3: F I L M
X4: D F V Y
PDL1_VH_CDR3.426
CARDX1YYX2YX3YX4X5DX6WGQ
X1: G R
X2: S Y
X3: S Y
X4: A G
X5: F I L M
X6: D F V Y
PDL1_VH_CDR3.427
CARX1X2YX3YX4X5X6YFDYWGQ
X1: D G N S
X2: P R
X3: S Y
X4: G S
X5: G S
X6: S Y
PDL1_VH_CDR3.428
CARX1X2YGYX3X4X5YFDYWGQ
X1: D G N S
X2: P R
X3: G S
X4: G S
X5: S Y
PDL1_VH_CDR3.429
CARX1X2YX3GX4X5X6YFDYWGQ
X1: D G N S
X2: P R
X3: S Y
X4: G S
X5: G S
X6: S Y
PDL1_VHCDR3.430
CARX1X2YGGX3X4X5YFDYWGQ
X1: D G N S
X2: P R
X3: G S
X4: G S
X5: S Y
PDL1_VH_CDR3.431
CARX1X2YX3YX4X5X6X7FDYWGQ
X1: D G N S
X2: P R
X3: S Y
X4: G S
X5: G S
X6: S Y
X7: A G
PDL1_VH_CDR3.432
CARX1X2YGYX3X4X5X6FDYWGQ
X1: D G N S
X2: P R
X3: G S
X4: G S
X5: S Y
X6: A G
PDL1_VH_CDR3.433
CARX1X2YX3GX4X5X6X7FDYWGQ
X1: D G N S
X2: P R
X3: S Y
X4: G S
X5: G S
X6: S Y
X7: A G
PDL1_VH_CDR3.434
CARX1X2YGGX3X4X5X6FDYWGQ
X1: D G N S
X2: P R
X3: G S
X4: G S
X5: S Y
X6: A G
PDL1_VH_CDR3.435
CARX1X2YYX3X4X5YX6X7DYWGQ
X1: G D E
X2: A G P R
X3: S Y
X4: S Y
X5: S Y
X6: A D S Y
X7: F I L M
PDL1_VH_CDR3.436
CARX1X2YYGX3X4YX5X6DYWGQ
X1: G D E
X2: A G P R
X3: S Y
X4: S Y
X5: A D S Y
XS: F I L M
PDL1_VH_CDR3.437
CARX1X2YYX3GX4YX5X6DYWGQ
X1: G D E
X2: A G P R
X3: S Y
X4: S Y
X5: A D S Y
X6: F I L M
PDL1_VH_CDR3.438
CARX1X2YYGGX3YX4X5DYWGQ
X1: G D E
X2: A G P R
X3: S Y
X4: A D S Y
X5: F I L M
PDL1_VH_CDR3.439
CARX1X2YYX3X4GYX5X6DYWGQ
X1: G D E
X2: A G P R
X3: S Y
X4: S Y
X5: A D S Y
X6: F I L M
PDL1_VH_CDR3.440
CARX1X2YYGX3GYX4X5DYWGQ
X1: G D E
X2: A G P R
X3: S Y
X4: A D S Y
X5: F I L M
PDL1_VH_CDR3.441
CARX1X2YYX3GGYX4X5DYWGQ
X1: G D E
X2: A G P R
X3: S Y
X4: A D S Y
X5: F I L M
PDL1_VH_CDR3.442
CARX1X2YYGGGYX3X4DYWGQ
X1: G D E
X2: A G P R
X3: A D S Y
X4: F I L M
PDL1_VH_CDR3.443
CARX1X2IYX3X4YX5X6X7DX8WGQ
X1: D G H N R S
X2: A G P R
X3: S Y
X4: D Y
X5: S Y
X6: A G P R
X7: F I L M
X8: D F V Y
PDL1_VH_CDR3.444
CARSGYYX1X2YYAMDYWGQ
X1: G R
X2: A D S Y
PDL1_VH_CDR3.445
CARSYX1YX2X3YYAMDYWGQ
X1: A G S T
X2: G R
X3: A D S Y
PDL1_VH_CDR3.446
CARSGX1YX2X3YYAMDYWGQ
X1: A G S T
X2: G R
X3: A D S Y
PDL1_VH_CDR3.447
CARSYYX1X2X3YYAMDYWGQ
X1: A D G N S T
X2: G R
X3: A D S Y
PDL1_VH_CDR3.448
CARSGYX1X2X3YYAMDYWGQ
X1: A D G N S T
X2: G R
X3: A D S Y
PDL1_VH_CDR3.449
CARSYX1X2X3X4YYAMDYWGQ
X1: A G S T
X2: A D G N S T
X3: G R
X4: A D S Y
PDL1_VH_CDR3.450
CARSGX1X2X3X4YYAMDYWGQ
X1: A G S T
X2: A D G N S T
X3: G R
X4: A D S Y
PDL1_VH_CDR3.451
CARSYYYX1X2YYAMDYWGQ
X1: S Y
X2: A D S Y
PDL1_VH_CDR3.452
CARSGYYX1X2YYAMDYWGQ
X1: S Y
X2: A D S Y
PDL1_VH_CDR3.453
CARSYX1YX2X3YYAMDYWGQ
X1: A G S T
X2: S Y
X3: A D S Y
PDL1_VH_CDR3.454
CARSGX1YX2X3YYAMDYWGQ
X1: A G S T
X2: S Y
X3: A D S Y
PDL1_VH_CDR3.455
CARSYYX1X2X3YYAMDYWGQ
X1: A D G N S T
X2: S Y
X3: A D S Y
PDL1_VH_CDR3.456
CARSGYX1X2X3YYAMDYWGQ
X1: A D G N S T
X2: S Y
X3: A D S Y
PDL1_VH_CDR3.457
CARSYX1X2X3X4YYAMDYWGQ
X1: A G S T
X2: A D G N S T
X3: S Y
X4: A D S Y
PDL1_VH_CDR3.458
CARSGX1X2X3X4YYAMDYWGQ
X1: A G S T
X2: A D G N S T
X3: S Y
X4: A D S Y
PDL1_VH_CDR3.459
CARSYYYX1X2YYAMDYWGQ
X1: G R
X2: A D S Y
PDL1_VH_CDR3.460
CARX1YYYX2X3X4YAMDYWGQ
X1: F H L P S Y
X2: S Y
X3: D G N S
X4: A D S Y
PDL1_VH_CDR3.461
CARX1YYYX2X3X4YAMDYWGQ
X1: D G
X2: S Y
X3: D G N S
X4: A D S Y
PDL1_VH_CDR3.462
CARX1X2YYX3X4X5YAMDYWGQ
X1: F H L P S Y
X2: A G
X3: S Y
X4: D G N S
X5: A D S Y
PDL1_VH_CDR3.463
CARX1X2YYX3X4X5YAMDYWGQ
X1: D G
X2: A G
X3: S Y
X4: D G N S
X5: A D S Y
PDL1_VH_CDR3.464
CARX1YYYX2X3X4YAMDYWGQ
X1: F H L P S Y
X2: G L R V
X3: D G N S
X4: A D S Y
PDL1_VH_CDR3.465
CARX1YYYX2X3X4YAMDYWGQ
X1: D G
X2: G L R V
X3: D G N S
X4: A D S Y
PDL1_VH_CDR3.466
CARX1X2YYX3X4X5YAMDYWGQ
X1: F H L P S Y
X2: A G
X3: G L R V
X4: D G N S
X5: A D S Y
PDL1_VH_CDR3.467
CARX1X2YYX3X4X5YAMDYWGQ
X1: D G
X2: A G
X3: G L R V
X4: D G N S
X5: A D S Y
PDL1_VH_CDR3.468
CVTSLTWLLRRKRSYWGQ
PDL1_VH_CDR3.469
CARX1GYYX2X3X4YYX5X6DX7WGQ
X1: D G
X2: S Y
X3: S Y
X4: G S
X5: A D S Y
X6: F I L M
X7: D F V Y
PDL1_VH_CDR3.470
CARX1GYGX2X3X4YYX5X6DX7WGQ
X1: D G
X2: S Y
X3: S Y
X4: G S
X5: A D S Y
X6: F I L M
X7: D F V Y
PDL1_VH_CDR3.471
CARX1GYYGX2X3YYX4X5DX6WGQ
X1: D G
X2: S Y
X3: G S
X4: A D S Y
X5: F I L M
X6: D F V Y
PDL1_VH_CDR3.472
CARX1GYGGX2X3YYX4X5DX6WGQ
X1: D G
X2: S Y
X3: G S
X4: A D S Y
X5: F I L M
X6: D F V Y
PDL1_VH_CDR3.473
CARX1GYYX2X3X4YGX5X6DX7WGQ
X1: D G
X2: S Y
X3: S Y
X4: G S
X5: A D S Y
X6: F I L M
X7: D F V Y
PDL1_VH_CDR3.474
CARX1GYGX2X3X4YGX5X6DX7WGQ
X1: D G
X2: S Y
X3: S Y
X4: G S
X5: A D S Y
X6: F I L M
X7: D F V Y
PDL1_VH_CDR3.475
CARX1GYYGX2X3YGX4X5DX6WGQ
X1: D G
X2: S Y
X3: G S
X4: A D S Y
X5: F I L M
X6: D F V Y
PDL1_VH_CDR3.476
CARX1GYGGX2X3YGX4X5DX6WGQ
X1: D G
X2: S Y
X3: G S
X4: A D S Y
X5: F I L M
X6: D F V Y
PDL1_VH_CDR3.477
CARSX1X2YX3X4YX5YX6MDX7WGQ
X1: G R
X2: F I N Y
X3: S Y
X4: D F V Y
X5: D Y
X6: A G
X7: D F V Y
PDL1_VH_CDR3.478
CARSX1X2X3X4X5YX6YX7MDX8WGQ
X1: G R
X2: F I N Y
X3: A G S T
X4: S Y
X5: D F V Y
X6: D Y
X7: A G
X8: D F V Y
PDL1_VH_CDR3.479
CARDGX1X2YX3YYYYX4DX5WGQ
X1: A G S T
X2: A S
X3: S Y
X4: F I L M
X5: D F V Y
PDL1_VH_CDR3.480
CARDGX1X2YX3YYX4YX5DX6WGQ
X1: A G S T
X2: A S
X3: S Y
X4: G W
X5: F I L M
X6: D F V Y
PDL1_VH_CDR3.481
CARDGX1X2YX3YYYGX4DX5WGQ
X1: A G S T
X2: A S
X3: S Y
X4: F I L M
X5: D F V Y
PDL1_VH_CDR3.482
CARDGX1X2YX3YYX4GX5DX6WGQ
X1: A G S T
X2: A S
X3: S Y
X4: G W
X5: F I L M
X6: D F V Y
PDL1_VH_CDR3.483
CARX1X2YYX3X4X5YYAX6DYWGQ
X1: D G N S
X2: G R
X3: S Y
X4: G I S V
X5: N S T Y
X6: F I L M
PDL1_VH_CDR3.484
CARX1X2YYX3X4X5YYAX6DYWGQ
X1: D G N S
X2: G R
X3: D G
X4: G I S V
X5: N S T Y
X6: F I L M
PDL1_VH_CDR3.485
CARX1X2YYX3X4X5GYAX6DYWGQ
X1: D G N S
X2: G R
X3: S Y
X4: G I S V
X5: N S T Y
X6: F I L M
PDL1_VH_CDR3.486
CARX1X2YYX3X4X5GYAX6DYWGQ
X1: D G N S
X2: G R
X3: D G
X4: G I S V
X5: N S T Y
X6: F I L M
PDL1_VH_CDR3.487
CARDX1YX2X3X4X5YYX6X7DX8WGQ
X1: I L
X2: F I N S T Y
X3: N S T Y
X4: A G S T
X5: S Y
X6: A G
X7: F I L M
X8: D F V Y
PDL1_VH_CDR3.488
CARGX1X2YX3X4X5YYX6X7DYWGQ
X1: E G K R
X2: D G
X3: S Y
X4: D G N S
X5: S Y
X6: A D S Y
X7: F I L M
PDL1_VH_CDR3.489
CARGX1X2YX3X4X5WYX6X7DYWGQ
X1: E G K R
X2: D G
X3: S Y
X4: D G N S
X5: S Y
X6: A D S Y
X7: F I L M
PDL1_VH_CDR3.490
CARX1YX2X3X4X5TX6WYPDLWGR
X1: G D E
X2: A D N T
X3: G I S V
X4: A G S T
X5: G S
X6: N S T Y
PDL1_VH_CDR3.491
CARX1GX2X3X4X5TX6WYPDLWGR
X1: G D E
X2: A D N T
X3: G I S V
X4: A G S T
X5: G S
X6: N S T Y
PDL1_VH_CDR3.492
CARGX1X2YX3X4X5YYX6X7DYWGQ
X1: E G K R
X2: D G
X3: S Y
X4: D G N S
X5: S Y
X6: A D S Y
X7: F I L M
PDL1_VH_CDR3.493
CARGX1X2YX3X4X5WYX6X7DYWGQ
X1: E G K R
X2: D G
X3: S Y
X4: D G N S
X5: S Y
X6: A D S Y
X7: F I L M
PDL1_VH_CDR3.494
CARVX1YYYX2SSYYX3X4DX5WGQ
X1: G S
X2: G I S V
X3: A D S Y
X4: F I L M
X5: D F V Y
PDL1_VH_CDR3.495
CARVX1YYX2X3SSYYX4X5DX6WGQ
X1: G S
X2: D 0
X3: G I S V
X4: A D S Y
X5: F I L M
X6: D F V Y
PDL1_VH_CDR3.496
CARVX1YYYX2S SX3YX4X5DX6WGQ
X1: G S
X2: G I S V
X3: D G
X4: A D S Y
X5: F I L M
X6: D F V Y
PDL1_VH_CDR3.497
CARVX1YYX2X3SSX4YX5X6DX7WGQ
X1: G S
X2: D G
X3: G I S V
X4: D G
X5: A D S Y
X6: F I L M
X7: D F V Y
PDL1_VH_CDR3.498
CARVX1YYYX2SSYWX3X4DX5WGQ
X1: G S
X2: G I S V
X3: A D S Y
X4: F I L M
X5: D F V Y
PDL1_VH_CDR3.499
CARVX1YYX2X3SSYWX4X5DX6WGQ
X1: G S
X2: D G
X3: G I S V
X4: A D S Y
X5: F I L M
X6: D F V Y
PDL1_VH_CDR3.500
CARVX1YYYX2SSX3WX4X5DX6WGQ
X1: G S
X2: G I S V
X3: D G
X4: A D S Y
X5: F I L M
X6: D F V Y
PDL1_VH_CDR3.501
CARVX1YYX2X3SSX4WX5X6DX7WGQ
X1: G S
X2: D G
X3: G I S V
X4: D G
X5: A D S Y
X6: F I L M
X7: D F V Y
PDL1_VH_CDR3.502
CARX1X2YX3YX4SX5YYYX6DX7WGQ
X1: D E
X2: A G P R
X3: D Y
X4: D G
X5: S Y
X6: F I L M
X7: D F V Y
PDL1_VH_CDR3.503
CARX1X2YX3RX4SX5YYYX6DX7WGQ
X1: D E
X2: A G P R
X3: D Y
X4: D G
X5: S Y
X6: F I L M
X7: D F V Y
PDL1_VH_CDR3.504
CARX1X2YX3YX4SX5YYX6X7DX8WGQ
X1: D E
X2: A G P R
X3: D Y
X4: D G
X5: S Y
X6: A G
X7: F I L M
X8: D F V Y
PDL1_VH_CDR3.505
CARX1X2YX3RX4SX5YYX6X7DX8WGQ
X1: D E
X2: A G P R
X3: D Y
X4: D G
X5: S Y
X6: A G
X7: F I L M
X8: D F V Y
PDL1_VH_CDR3.506
CATGNSVRLASWEGYFYWGQ
PDL1_VH_CDR3.507
CARQGRVRLATESGLDYWGQ
PDL1_VH_CDR3.508
CARX1GX2DX3X4X5X6X7X8PFDX9WGP
X1: E K M V
X2: A S
X3: H R
X4: I L
X5: S T
X6: V D E I K M N
X7: D I N V
X8: D E H Q
X9: A D S Y
PDL1_VH_CDR3.509
CARX1X2X3YYX4X5X6X7YX8FDYWGQ
X1: D G
X2: G R
X3: G S
X4: G V
X5: A S
X6: G S
X7: G S
X8: H P S Y
PDL1_VH_CDR3.510
CARX1X2X3YRX4X5X6X7YX8FDYWGQ
X1: D G
X2: G R
X3: G S
X4: G V
X5: A S
X6: G S
X7: G S
X8: H P S Y
PDL1_VH_CDR3.511
CARX1SFX2QLTX3YAX4FDIWGQ
X1: E V
X2: D E H Q
X3: G L R V
X4: A P
PDL1_VH_CDR3.512
CARX1X2YYYGSX3X4YX5X6DYWGQ
X1: D G
X2: A G P R
X3: S Y
X4: H P S Y
X5: A D S Y
X6: F I L M
PDL1_VH_CDR3.513
CARX1X2GYYGSX3X4YX5X6DYWGQ
X1: D G
X2: A G P R
X3: S Y
X4: H P S Y
X5: A D S Y
X6: F I L M
PDL1_VH_CDR3.514
CARX1X2YYYGSGX3YX4X5DYWGQ
X1: D G
X2: A G P R
X3: H P S Y
X4: A D S Y
X5: F I L M
PDL1_VH_CDR3.515
CARX1X2GYYGSGX3YX4X5DYWGQ
X1: D G
X2: A G P R
X3: H P S Y
X4: A D S Y
X5: F I L M
PDL1_VH_CDR3.516
CARX1X2YYYGSX3GYX4X5DYWGQ
X1: D G
X2: A G P R
X3: S Y
X4: A D S Y
X5: F I L M
PDL1_VH_CDR3.517
CARX1X2GYYGSX3GYX4X5DYWGQ
X1: D G
X2: A G P R
X3: S Y
X4: A D S Y
X5: F I L M
PDL1_VH_CDR3.518
CARX1X2YYYGSGGYX3X4DYWGQ
X1: D G
X2: A G P R
X3: A D S Y
X4: F I L M
PDL1_VH_CDR3.519
CARX1X2GYYGSGGYX3X4DYWGQ
X1: D G
X2: A G P R
X3: A D S Y
X4: F I L M
PDL1_VH_CDR3.520
CARGRPPYX1SX2WYYX3DYWGQ
X1: G S
X2: G S
X3: F L
PDL1_VH_CDR3.521
CARGRPPYX1SX2WGYX3DYWGQ
X1: G S
X2: G S
X3: F L
PDL1_VH_CDR3.522
CARGRPPYX1SX2WYX3X4DYWGQ
X1: G S
X2: G S
X3: A G
X4: F L
PDL1_VH_CDR3.523
CARGRPPYX1SX2WGX3X4DYWGQ
X1: G S
X2: G S
X3: A G
X4: F L
PDL1_VL_CDR1.1
MTCX1ASSSX2X3YX4X5WYQ
X1: R S
X2: I V
X3: N S
X4: I M
X5: H N Y
PDL1_VL_CDR1.2
LTCRAVTTX1NX2ANWVQ
X1: N S
X2: F Y
PDL1_VL_CDR1.3
ITCRASQX1X2X3X4YLX5WYQ
X1: A D S Y
X2: I V
X3: G S
X4: N S T
X5: A D N T
PDL1_VL_CDR1.4
LTCX1SS TGAVTX2X3X4YX5NWVQ
X1: G R
X2: S T
X3: G S
X4: H N
X5: A P
PDL1_VL_CDR1.5
ISCTGX1SSX2X3GX4YNX5VSWYQ
X1: S T
X2: D N
X3: I V
X4: A G S T
X5: D Y
PDL1_VL_CDR1.6
ISCTGX1SSDX2GX3YNX4VSWYQ
X1: S T
X2: I V
X3: A G S T
X4: F L Y
PDL1_VL_CDR1.7
ISCTGX1SSDX2GX3YNX4VSWYQ
X1: S T
X2: I V
X3: A G S T
X4: F L Y
PDL1_VL_CDR1.8
ISCTGTSSDX1GX2YX3X4VSWYQ
X1: I V
X2: A D G N S T
X3: D N
X4: F L Y
PDL1_VL_CDR1.9
ISCTGX1SSDX2GX3YNX4VSWYQ
X1: S T
X2: I V
X3: A G S T
X4: F L Y
PDL1_VL_CDR1.10
ISCRASX1SVX2X3X4GX5SX6MHWYQ
X1: E Q
X2: A D S Y
X3: S T
X4: S Y
X5: N Y
X6: F Y
PDL1_VL_CDR1.11
ISCRASX1SVX2X3X4GYSX5MHWYQ
X1: E K Q
X2: A D S Y
X3: S T
X4: S Y
X5: F Y
PDL1_VL_CDR1.12
ISCRSSQSLX1HSX2GX3TYLX4WYL
X1: L V
X2: D N
X3: K N
X4: A P S T D E H K N Q Y
PDL1_VL_CDR1.13
ISCRSSQSLX1HSX2GX3TYLX4WYL
X1: L V
X2: D N
X3: K N
X4: A P S T D E H K N Q Y
PDL1_VL_CDR1.14
INCKSSQSX1LX2SX3NX4KNYLAWYQ
X1: L V
X2: N Y
X3: G R S
X4: R H K N Q S
PDL1_VL_CDR2.1
LIYX1ASNX2X3SGVP
X1: A G T D E K N R S
X2: L R
X3: A E P Q
PDL1_VL_CDR3.1
YYCQQX1X2X3X4X5TFGG
X1: S Y
X2: S Y
X3: G D E K N R S
X4: F H L P S Y
X5: F H L P S Y
PDL1_VL_CDR3.2
YYCQQWX1X2X3X4TFGG
X1: S Y
X2: G D E K N R S
X3: F H L P S Y
X4: F H L P S Y
PDL1_VL_CDR33
YYCQQX1X2X3X4X5TFGG
X1: S Y
X2: A D G H N P R S T
X3: G D E K N R S
X4: F H L P S Y
X5: F H L P S Y
PDL1_VL_CDR3.4
YYCQQWX1X2X3X4TFGG
X1: A D G H N P R S T
X2: G D E K N R S
X3: F H L P S Y
X4: F H L P S Y
PDL1_VL_CDR3.5
YYCQQX1X2X3X4WTFGG
X1: S Y
X2: S Y
X3: G D E K N R S
X4: F H L P S Y
PDL1_VL_CDR3.6
YYCQQWX1X2X3 WTFGG
X1: S Y
X2: G D E K N R S
X3: F H L P S Y
PDL1_VI_CDR3.7
YYCQQX1X2X3X4WTFGG
X1: S Y
X2: A D G H N P R S T
X3: G D E K N R S
X4: F H L P S Y
PDL1_VL_CDR3.8
YYCQQWX1X2X3WTFGG
X1: A D G H N P R S T
X2: G D E K N R S
X3: F H L P S Y
PDL1_VL_CDR3.9
YYCQQGX1SX2PX3TFGG
X1: S Y
X2: S F L Y
X3: R W
PDL1_VL_CDR3.10
YYCQQX1X2SX3PX4TFGG
X1: S Y
X2: A D G N S T
X3: S F L Y
X4: R W
PDL1_VL_CDR3.11
YYCQQGX1SX2PX3TFGG
X1: A D G N S T
X2: S F L Y
X3: R W
PDL1_VL_CDR3.12
YYCQQX1X2SX3PX4TFGG
X1: S Y
X2: S Y
X3: A G L M R S T V W
X4: R W
PDL1_VL_CDR3.13
YYCQQGX1SX2PX3TFGG
X1: S Y
X2: A G L M R S T V W
X3: R W
PDL1_VL_CDR3.14
YYCQQX1X2SX3PX4TFGG
X1: S Y
X2: A D G N S T
X3: A G L M R S T V W
X4: R W
PDL1_VL_CDR3.15
YYCQQGX1SX2PX3TFGG
X1: A D G N S T
X2: A G L M R S T V W
X3: R W
PDL1_VL_CDR3.16
YYCQQX1X2SX3PX4TFGG
X1: S Y
X2: S Y
X3: S F L Y
X4: F H L P S Y
PDL1_VL_CDR3.17
YYCQQGX1SX2PX3TFGG
X1: S Y
X2: S F L Y
X3: F H L P S Y
PDL1_VL_CDR3.18
YYCQQX1X2SX3PX4TFGG
X1: S Y
X2: A D G N S T
X3: S F L Y
X4: F H L P S Y
PDL1_VL_CDR3.19
YYCQQGX1SX2PX3TFGG
X1: A D G N S T
X2: S F L Y
X3: F H L P S Y
PDL1_VL_CDR3.20
YYCQQX1X2SX3PX4TFGG
X1: S Y
X2: S Y
X3: A G L M R S T V W
X4: F H L P S Y
PDL1_VL_CDR3.21
YYCQQGX1SX2PX3TFGG
X1: S Y
X2: A G L M R S T V W
X3: F H L P S Y
PDL1_VL_CDR3.22
YYCQQX1X2SX3PX4TFGG
X1: S Y
X2: A D G N S T
X3: A G L M R S T V W
X4: F H L P S Y
PDL1_VLCDR3.23
YYCQQGX1SX2PX3TFGG
X1: A D G N S T
X2: A G L M R S T V W
X3: F H L P S Y
PDL1_VL_CDR3.24
YYCQQX1X2SX3PX4TFGG
X1: S Y
X2: S Y
X3: S F L Y
X4: R W
PDL1_VL_CDR3.25
YYCQQYX1SX2PX3X4FGG
X1: S Y
X2: N S T Y
X3: F L Y
X4: A I T V
PDL1_VL_CDR3.26
YYCQQWX1SX2PX3X4FGG
X1: S Y
X2: N S T Y
X3: F L Y
X4: A I T V
PDL1_VL_CDR3.27
YYCQQYX1SX2PX3X4FGG
X1: D G N S
X2: N S T Y
X3: F L Y
X4: A I T V
PDL1_VL_CDR3.28
YYCQQWX1SX2PX3X4FGG
X1: D G N S
X2: N S T Y
X3: F L Y
X4: A I T V
PDL1_VL_CDR3.29
YYCQQYX1SX2PX3X4FGG
X1: S Y
X2: N S T Y
X3: L G R V W
X4: A I T V
PDL1_VL_CDR3.30
YYCQQWX1SX2PX3X4FGG
X1: S Y
X2: N S T Y
X3: L G R V W
X4: A I T V
PDL1_VL_CDR3.31
YYCQQYX1SX2PX3X4FGG
X1: D G N S
X2: N S T Y
X3: L G R V W
X4: A I T V
PDL1_VL_CDR3.32
YYCQQWX1SX2PX3X4FGG
X1: D G N S
X2: N S T Y
X3: L G R V W
X4: A I T V
PDL1_VL_CDR3.33
YYCX1X2YX3SSX4X5X6X7FGG
X1: P Q S
X2: P Q S
X3: A D N T
X4: H N P T
X5: P S T
X6: F L Y
X7: A M T V
PDL1_VL_CDR3.34
YYCX1X2YX3SSX4X5X6X7FGG
X1: P Q S
X2: P Q S
X3: A D N T
X4: H N P T
X5: P S T
X6: G L V W
X7: A M T V
PDL1_VL_CDR3.35
YYCQX1YDX2SX3X4X5X6FGG
X1: L A E P Q S V
X2: G S
X3: H N P S T Y
X4: P T
X5: F L Y
X6: A M T V
PDL1_VL_CDR3.36
YYCQX1WDX2SX3X4X5X6FGG
X1: L A E P Q S V
X2: G S
X3: H N P S T Y
X4: P T
X5: F L Y
X6: A M T V
PDL1_VL_CDR337
YYCQX1YDX2SX3X4X5X6FGG
X1: L A E P Q S V
X2: G S
X3: H N P S T Y
X4: P T
X5: G L V W
X6: A M T V
PDL1_VL_CDR3.38
YYCQX1WDX2SX3X4X5X6FGG
X1: L A E P Q S V
X2: G S
X3: H N P S T Y
X4: P T
X5: G L V W
X6: A M T V
PDL1_VL_CDR3.39
YYCX1X2YDX3SX4X5X6YVFGG
X1: A E P Q
X2: A S
X3: A D S Y
X4: L S
X5: D G N S
X6: A D G H P R
PDL1_VL_CDR3.40
YYCX1X2WDX3SX4X5X6YVFGG
X1: A E P Q
X2: A S
X3: A D S Y
X4: L S
X5: D G N S
X6: A D G H P R
PDL1_VL_CDR3.41
YYCX1X2YDX3SX4X5X6X7VFGG
X1: A E P Q
X2: A S
X3: A D S Y
X4: L S
X5: D G N S
X6: A D G H P R
X7: G L V W
PDL1_VL_CDR3.42
YYCX1X2WDX3SX4X5X6X7VFGG
X1: A E P Q
X2: A S
X3: A D S Y
X4: L S
X5: D G N S
X6: A D G H P R
X7: G L V W
PDL1_VL_CDR3.43
YYCQSYDX1SX2X3X4X5VFGG
X1: N S
X2: L A G P R S V
X3: A D H N P S T Y
X4: A D G H I L N P R S T V
X5: D F V Y
PDL1_VL_CDR3.44
YYCQSWDX1SX2X3X4X5VFGG
X1: N S
X2: L A G P R S V
X3: A D H N P S T Y
X4: A D G H I L N P R S T V
X5: D F V Y
PDL1_VLambda_CDR3.1
YYCQQX1X2X3X4X5TFGG
X1: S Y
X2: S Y
X3: N S
X4: F H L P S Y
X5: F H L P S Y
PDL1_VLambda_CDR3.2
YYCQQX1X2X3X4X5TFGG
X1: S Y
X2: D G H N R S
X3: N S T Y
X4: F H L P S Y
X5: F H L P S Y
PDL1_VLambda_CDR3.3
YYCQQX1X2X3WX4TFGG
X1: S Y
X2: S Y
X3: N S
X4: F H L P S Y
PDL1_VLambda_CDR3.4
YYCQQX1X2X3WX4TFGG
X1: S Y
X2: D G H N R S
X3: N S
X4: F H L P S Y
PDL1_VLambda_CDR3.5
YYCQQX1X2X3X4WTFGG
X1: S Y
X2: S Y
X3: N S
X4: L P S F H Q Y
PDL1_VLambda_CDR3.6
YYCQQX1X2X3X4WTFGG
X1: S Y
X2: D G H N R S
X3: N S
X4: F H L P S Y
PDL1_VLambda_CDR3.7
YYCQQX1X2X3WWTFGG
X1: S Y
X2: S Y
X3: N S
PDL1_VLambda_CDR3.8
YYCQQX1X2X3WWTFGG
X1: S Y
X2: D G H N R S
X3: N S
PDL1_VLambda_CDR3.9
YYCQQX1X2X3X4PX5TFGG
X1: H P S Y
X2: K N R S
X3: R G D E H K N Q S
X4: F H I L N Y
X5: L W
PDL1_VLambda_CDR3.10
YYCQQWX1X2X3PX4TFGG
X1: K N R S
X2: R G D E H K N Q S
X3: F H I L N Y
X4: L W
PDL1_VLambda_CDR3.11
YYCQQX1X2X3X4PX5TFGG
X1: H P S Y
X2: K N R S
X3: R G D E H K N Q S
X4: A G L M R S T V W
X5: L W
PDL1_VLambda_CDR3.12
YYCQQWX1X2X3PX4TFGG
X1: K N R S
X2: R G D E H K N Q S
X3: A G L M R S T V W
X4: L W
PDL1_VLambda_CDR3.13
YYCQQYX1X2X3PX4X5FGG
X1: S Y
X2: N S
X3: N S T Y
X4: F L P S
X5: A I T V
PDL1_VLambda_CDR3.14
YYCQQWX1X2X3PX4X5FGG
X1: S Y
X2: N S
X3: N S T Y
X4: F L P S
X5: A I T V
PDL1_VLambda_CDR3.15
YYCQQYX1X2X3PX4X5FGG
X1: D G N S
X2: N S
X3: N S T Y
X4: F L P S
X5: A I T V
PDL1_VLambda_CDR3.16
YYCQQWX1X2X3PX4X5FGG
X1: D G N S
X2: N S
X3: N S T Y
X4: F L P S
X5: A I T V
PDL1_VLambda_CDR3.17
YYCQQYX1X2X3PX4X5FGG
X1: S Y
X2: N S
X3: N S T Y
X4: L G R V W
X5: A I T V
PDL1_VLambda_CDR3.18
YYCQQWX1X2X3PX4X5FGG
X1: S Y
X2: N S
X3: N S T Y
X4: L G R V W
X5: A I T V
PDL1_VLambda_CDR3.19
YYCQQYX1X2X3PX4X5FGG
X1: D G N S
X2: N S
X3: N S T Y
X4: L G R V W
X5: A I T V
PDL1_VLambda_CDR3.20
YYCQQWX1X2X3PX4X5FGG
X1: D G N S
X2: N S
X3: N S T Y
X4: L G R V W
X5: A I T V
PDL1_VLambda_CDR3.21
YYCX1X2YX3SSX4X5X6X7FGG
X1: P Q S
X2: P Q S
X3: A D G N S T
X4: H N P T
X5: P S T
X6: F L
X7: A M T V
PDL1_VLambda_CDR3.22
YYCX1X2YX3SSX4X5X6X7FGG
X1: P Q S
X2: P Q S
X3: A D G N S T
X4: H N P T
X5: P S T
X6: G L V W
X7: A M T V
PDL1_VLambda_CDR3.23
YYCQX1YX2SX3PPX4X5FGG
X1: P Q S
X2: S Y
X3: N S
X4: G L V W
X5: A I T V
PDL1_VLambda_CDR3.24
YYCQX1WX2SX3PPX4X5FGG
X1: P Q S H Y
X2: S Y
X3: N S
X4: G L V W
X5: A I T V
PDL1_VLambda_CDR3.25
YYCQX1YX2SX3PPX4X5FGG
X1: P Q S
X2: D G N S
X3: N S
X4: G L V W
X5: A I T V
PDL1_VLambda_CDR3.26
YYCQX1WX2SX3PPX4X5FGG
X1: P Q S
X2: D G N S
X3: N S
X4: G L V W
X5: A I T V
PDL1_VLambda_CDR3.27
YYCQX1YX2SX3PPX4X5FGG
X1: P Q S
X2: S Y
X3: R S T W
X4: G L V W
X5: A I T V
PDL1_VLambda_CDR3.28
YYCQX1WX2SX3PPX4X5FGG
X1: P Q S B Y
X2: S Y
X3: R S T W
X4: G L V W
X5: A I T V
PDL1_VLambda_CDR3.29
YYCQX1YX2SX3PPX4X5FGG
X1: P Q S
X2: D G N S
X3: R S T W
X4: G L V W
X5: A I T V
PDL1_VLambda_CDR3.30
YYCQX1WX2SX3PPX4X5FGG
X1: P Q S
X2: D G N S
X3: R S T W
X4: G L V W
X5: A I T V
PDL1_VLambda_CDR3.31
YYCX1X2WDX3SLX4X5X6VFGG
X1: A E P Q S
X2: A F I S T V
X3: A D S Y
X4: D G N S
X5: A D G H P R
X6: H P S Y
PDL1_VLambda_CDR3.32
YYCX1X2WDX3SLX4X5X6VFGG
X1: A E P Q S
X2: A F I S T V
X3: A D S Y
X4: D G N S
X5: A D G H P R
X6: G L V W
PDL1_VLambda_CDR3.33
YYCQX1YX2X3X4PX5X6X7X8PGG
X1: P Q S
X2: D N
X3: N S
X4: S W
X5: P T
X6: A D G H I L N P R S T V

### Example 6

### Adapter-Directed Antibody Phage Display

[0386] The adapter-directed phage display system is illustrated in FIG. 12. This system was comprised of two components as described in U.S. Pat. No. 7,175,983 B2: a phagemid vector avoiding any sequence encoding for phage coat protein, and a helper phage GMCT with one copy of recombinant coat protein. In the phagemid vector, the target gene was fused in-frame with the HA-tag (for detection) and adapter 1 sequence. The protein of interest was expressed as a secretory protein with adapter 2 as a tag (left panel in FIG. 12A). Diverse DNA sequences were inserted into this vector to construct an expression library. In the engineered helper phage genome, the adapter 2, which is able to form a pairwise heterodimer with the adapter 1, was fused in-frame with one of the phage coat proteins. For detection purposes, the Myc-tag sequence was placed in-between adapter 2 and coat protein. Both adapter fusions are transported into the periplasm, where the adapter association occurs followed by the stabilization of the heterodimer by a disulfide bond. The incorporation of the heterodimer into the phage particle thus leads to the display of target protein on the phage surface (right panel in FIG. 12A).

[0387] We chose two coiled-coil sequences, derived from the intracellular C-terminus of gamma-aminobutyric acid (B) receptors GABA_{B}-R1 and GABA_{B}-R2GR1, as the adapters in this study. The adapter sequences, termed GR1 and GR2, are shown in FIG. 12B. A previous study proved that these sequences preferentially formed parallel coiled-coil heterodimers under physiological buffer and temperature conditions (Kammerer, R. A., Frank, S., Schulthess, T., Landwehr, R., Lustig, A. & Engel, J. (1999). Heterodimerization of a functional GABAB receptor is mediated by parallel coiled-coil alpha-helices. Biochemistry. 38, 13263-13269.). The coiled-coil peptides from GABA_{B}-R1 only folded into relatively unstable homodimers, whereas the coiled-coil peptides from GABA_{B}-R2 were largely unstructured and could not form any homodimers. To further stabilize the heterodimer on the phage surface, we have introduced a spacer sequence (ValGlyGlyCys) after each coiled-coil sequence to lock the heterodimeric coiled-coil pair via a disulfide bond between the cysteine residues.

### Example 7

### Construction of GMCT Helper Phage Vector

[0388] A unique KpnI site was introduced into the gene III leader sequence of M13KO7 helper phage vector (Amersham Pharmacia) by PCR-based site-directed silent mutagenesis.

[0389] The KO7 genome was amplified by PCR using the following primers containing KpnI sites: p3KN1:5′-TTTAGTGGTA CCTTTCTATTCTCACTCCGCTG-3′ and p3KN2:5′-TAGAAAGGTACCACTAAAGGAATTGCGAATAA-3′. The PCR products were gel purified, cut with KpnI and ligated, then transformed into TG1 cells by electroporation. The kanamycin-resistant colonies were grown overnight in 96-well microtiter plates in 207 medium with 70 μg/ml kanamycin. The supernatants were directly employed to phage ELISA assay for phage production screening to eliminate the loss-of-function mutants caused by PCR errors. The presence of KpnI site in phage-positive clones was further confirmed by KpnI digestion and sequencing.

[0390] GMCT helper phage vector was constructed from KpnI-introduced M13KO7 helper phage vector by replacing the KpnI-BamHI fragment of WT gene III with a synthetic DNA fragment, which encodes two cistrons. The first is for a partial pIII leader (amino acid residues 11-19), the pIII C-terminus domain (amino acids 217 to 405) sequence fused with the adaptor GR2 and myc-tag sequence; the second for a ribosome binding sequence (S/D), the bacterial protein OmpA leader sequence and the wild-type gene III fragment before BamHI site.

[0391] Both the engineered and wild-type gene III were under the control of the original gene III promoter (shown in FIG. 13).

### Example 8

### Helper Phage Generation

[0392] Escherichia coli TG1 (supE Δ(hsdM-mcrB)5(rₖ⁻mₖ⁻McrB⁻)thi Δ(lac-proAB/F′ traD36), LacI^{q} Δ(lacZ)M15) was used for phage production; The TG1 culture supernatant containing helper phage virus was streaked on a 2×YT agar plate. 4 ml of soft agar mixed with 0.5 ml of TG1 culture (OD600=0.5) was poured on to the plate. Phage plaques were formed after an overnight incubation at 37° C. A single phage plaque was picked and used to inoculate 10 ml 2×YT culture with 70 μg/ml kanamycin. After incubation at 37° C. for 2 hours with constant shaking at 250 rpm, the culture was transferred to a 2 liter flask containing 500 ml 2×YT with 70 μg/ml kanamycin, and incubated overnight with constant shaking at 250 rpm. The phage particles in the supernatants were then precipitated using polyethylene glycol (PEG)/NaCl followed by 10000 rpm centrifugation, and re-suspended in phosphate-buffed saline (PBS). PEG-precipitation was repeated once. The phage concentration was determined by OD₂₆₈ measurement, assuming 1 unit at OD₂₆₈ is approximately 5×10¹² phage particles/ml. The phage yield of GMCT helper phage was approximately 8×10¹¹ phage/ml in the culture supernatant, which was similar to that of wild type helper phage M13KO7, indicating that assembly of recombinant pill into phage particles did not significantly affect phage production.

### Example 9

### Phagemid Fab-Display Vector Construction

[0393] The Fab-display phagemid vector was derived from pBluescript SK(+) (Stratagene). A unique AgeI restriction site was introduced immediately after the lac promoter by PCR-based site-directed mutagenesis, with a set of primers (pBS-Ska: 5′-GGAATTGTGAGCGGATAACAATTTACCGGTCACACAGGAAACAGCTATGACCATG-3′ and pBS-SKb: 5′ CATGGTCATAGCTGTTTCCTGTGTGACCGGTAAATTGTTATCCGCTCACAAT TCC-3′). The Xho I and Kpn I sites were then deleted by digestion and consequent blunt-end ligation. The synthetic DNA fragment flanked by AgeI site at 5′ and San site at 3′, containing two cistrons for both light chain and heavy chain of Fab molecule, and coding sequences for adaptor GR1 and HA-(His)₆-tag (referred to as DH tag), was cloned into the engineered pBluescript SK(+). Both light and heavy chains are driven by a single lac promoter, with ribosome-binding sequence S/D and secretion leader sequence in front of each chain. The VH and VK from an anti-IL13 receptor (IL-13R) antibody, and the constant regions of CH1 and Ck of human IgG1 antibody were used for the vector construction. In the pABMX492 vector, the expression of antibody heavy chain and light chain is driven by a single lac promoter. Only light chain was fused with adapter GR1 sequence. An amber stop codon which reads as amino acid Glutamine (Q) in TG1 strain was placed in between HA/His-tag and GR1 adapter (vector map shown in FIG. 14).

### Example 10

### Adapter-Directed Phage Display of Fab Molecules

[0394] The Fab display experiments were carried out by infection of TG1 cells harboring pABMX492 vector with GMCT helper phage. The infected TG1 cells were grown in 2×YT/Amp/Kan at 30° C. overnight. The phagemid particles were precipitated by PEG/NaCl from culture supernatants, and resuspended in PBS. The PEG-precipitation was repeated once. The antibody displayed on phage surface was detected by its antigen binding activity via phage ELISA assay. Briefly, the antigens were first coated on ELISA plates. After 5% milk/PBS blocking, the phage solution in milk/PBS was added to ELISA plates. The phages bound to antigen on the plate were detected by incubation with HRP-conjugated anti-M13 antibody. The substrate ABTS [2,2′Azino-bis(3-ethylbenzthiazoline-6-sulfonic acid)] was used for measurement of HRP activity.

[0395] Phage ELISA data showed a dose-dependent binding activity of pABMX492 phages to antigen IL-13R, with a binding saturation at around 10¹³ phage/ml. This result confirmed the functional display of anti-IL13 receptor Fab on phage surface through adapter-directed display system.

### Example 11

### Construction of Display Vectors for Fab Antibody Libraries

[0396] Two vectors were constructed for Fab library cloning from the engineered pBluescript SK(+) described in example 9. Briefly, the AgeI and BglII fragment in the engineered pBluescript SK(+) was replaced by a synthetic DNA fragment containing expression cassettes for both light and heavy chains. The vector map for Fab library with human k light chain is illustrated in FIG. 15A. The vector map for Fab library with human lambda light chain is illustrated in FIG. 15B. In both Fab display vectors, the cistron for light chain was placed in front of heavy chain cistron. Another difference from vector pABMX492 is that both k and lambda vectors didn't have an amber stop between HA/His tag and adapter GR1.

### Example 12

### PDL1 Library Construction Strategy

[0397] Highly diverse synthetic libraries were computationally designed to capture the most important structure diversity. Construction of these synthetic libraries consisted of the following four major consecutive steps: syntheses of library degenerated oligos (40 to 90mer), assembly of building blocks and chain libraries from 45 to 90mer oligos, ORF filtering of building blocks to remove open-reading frame shifts, and Fab library construction by cloning light chain and heavy chain into Fab display vectors (FIG. 16). In the PDL1 library construction, heavy chain library was assembled from two building blocks: VHFR building block and VH-CDR3-CH1 building block. VHFR building block contained VH-FR1, CDR1, FR2, CDR2 and FR3. The VH-CDR1 and CDR2 contributed the amino acid diversity of 10⁵ to 10⁶. The building block of VH-CDR3-CH1 had amino acid diversity of 10⁵ to 10⁶ in the CDR3 region. The chain libraries for light chains were assembled into full length of VLs including FR1,2,3 and CDR1,2,3. The amino acid diversity of K and lambda light chain libraries was 10⁵ to 10⁸ in the CDR regions.

### Example 13

### Library Oligo Synthesis and Quality Analysis

[0398] All library oligos were simultaneously sent to three vendors (Operon, Sigma, and IDT) for synthesis. All oligos including degenerate oligos were analyzed by Mass Spectrometry. The purity of oligos was assessed by level of target oligo molecular weight peak over side reaction products (FIG. 17A). The oligo fidelity was evaluated by MS profile comparison of actual oligo mass spectrometry (Main peak) with predicted MS masses from simulation based on design. We classified the oligos with close match between actual MS and simulation as high fidelity, oligos with some deviation from simulations as medium fidelity, and oligos with substantial deviation from simulation as low fidelity (FIG. 17B). All oligos were then divided into four quality groups according to their purity and fidelity: High, Medium, Low, and Junk. Those of low and junk purity were re-synthesized. From the triplicates of each oligo, the one with highest quality was used for building block assembly.

### Example 14

### Assembly of Building Block and Chain Libraries

[0399] Two rounds of PCRs using Pfu DNA polymerase (Stratagene #600602) were involved in construction of each building block or chain library: assembly PCR and amplification PCR. To ensure an equal representation of each designed sequence, 20 to 50 overlapping oligos including degenerate oligos with high quality were mixed proportionally according to their complexity and then assembled to form the template for PCR amplification.

### Example 14

### 1. Construction of VH-FR Building Blocks

[0400] Total 12 of CDR2 oligos were divided into 6 groups based on the overlapping sequences at their 5′ and 3′ to assemble with 16 CDR1 oligos and 7 FR oligos to make VHFR building block. The FIG. 18A illustrated group 1 assembly of 28 overlapping oligos. The assembly PCR was carried as following. The oligo stocks of 100 uM were mixed together according to oligo diversity to make 0.5 uM oligo solution. 50 ul of PCR solutions were then prepared as described in the PCR assembly table 5. The PCR solutions were preheated at 94° C. for 2 minutes, then 25 thermal cycles of denature (94° C., 45 second), anneal (51° C., 45 second), and elongate (72° C., 1 min.) were performed, followed with a cycle of 72 C, 10 min for completion.

TABLE 5
PCR Assembly for VHFR

| Assembly reaction | #1 | #2 | #3 |
|---|---|---|---|
| oligo mix | 1 ul | 2 ul | 3 ul |
| 10 × Pfu buffer | 5 ul | 5 ul | 5 ul |
| dNTP (2.5 mM each) | 4 ul | 4 ul | 4 ul |
| Mg(Ac) 25 mM | 2 ul | 2 ul | 2 ul |
| H2O | 36 ul | 35 ul | 34 ul |
| Pfu turbo | 2 ul | 2 ul | 2 ul |
| Total | 50 ul | 50 ul | 50 ul |

[0401] The assembled building blocks were further amplified by PCR by using the primers AM-61 (5′-ACCCTCGTTCCGATGCTAAGCTTCGC-3′) and AM-148 (5′-ACGGGCGCAGTAGTACACTGC-3). The PCR solutions were prepared by following the table 6, then 35 cycles of PCR reactions were run as described above.

TABLE 6
PCR Amplification of VH-FR building block

| Amplification reaction | #1 | #2 | #3 |
|---|---|---|---|
| Assembly reaction | 10 ul | 10 ul | 10 ul |
| | assembly #1 | assembly #2 | assembly #3 |
| 5′ primer AM-61 (10 uM) | 5 ul | 5 ul | 5 ul |
| 3′ primer AM-148 (10 uM) | 5 ul | 5 ul | 5 ul |
| 10 × Pfu buffer | 10 ul | 10 ul | 10 ul |
| dNTP (2.5 mM each) | 8 ul | 8 ul | 8 ul |
| H2O | 60 ul | 60 ul | 60 ul |
| Pfu | 2 ul | 2 ul | 2 ul |
| Total | 100 ul | 100 ul | 100 ul |

[0402] The assembled building blocks were purified by electrophoresis in 1.5% agarose gel, were then combined from all 6 groups according to their diversity to make equal representation of each designed sequence in the final building block library.

### Example 14

### 2: Construction of VH-CDR3-CH1 Building Block

[0403] Total 516 oligos were used to assemble with CH1 DNA fragment to make VH-CDR3-CH1 building block. The human CH1 fragment was amplified from pABMX492 vector by PCR, using a set of primers: AM-58 (5′-GTCTCGAGCGCAAGCACCAAAGGC-3′) and AM-115 (5′-CATGTGTGAGTTTTGTCACAAGATTTGGGC-3′). The CDR3 oligos (total 516) were divided into 12 groups to assemble with CH₁ (FIG. 18B shows one subgroup assembly). The assembly PCRs were performed as described in Example 14.1. Briefly, the oligos were mixed with CH1 fragment as described in the table 7, then 25 cycles of assembly PCR was carried out with each cycle of 94° C., 45 second of denature, 51° C.; 45 second of anneal; and 72° C., 1 min of elongate.

TABLE 7
PCR Assembly for VH-CDR3-CH1

| Assembly reaction | #1 | #2 | #3 |
|---|---|---|---|
| oligo mix | 1 ul | 2 ul | 3 ul |
| CH1 | 5 ul | 5 ul | 5 ul |
| 10 x Pfu buffer | 5 ul | 5 ul | 5 ul |
| dNTP (2.5 mM each) | 4 ul | 4 ul | 4 ul |
| Mg(Ac) 25 mM | 2 ul | 2 ul | 2 ul |
| H2O | 31 ul | 30 ul | 29 ul |
| Pfu turbo | 2 ul | 2 ul | 2 ul |
| Total | 50 ul | 50 ul | 50 ul |

[0404] The assembled building blocks were further amplified by 35 cycles of PCR by using the primer AM-138 (5′-GACACTGCAGTGTACTACTGCGCC-3′) and AM-115. The PCR solutions were prepared by following the table 4, then 35 cycles of PCR reactions were run as described in example 14.1.

TABLE 8
PCR Amplification of VH-CDR3-CH1 building block

| Amplification reaction | #1 | #2 | #3 |
|---|---|---|---|
| Assembly reaction | 10 ul | 10 ul | 10 ul |
| | assembly #1 | assembly #2 | assembly #3 |
| 5′ primer AM-138 (10 uM) | 5 ul | 5 ul | 5 ul |
| 3′ primer AM-115 (10 uM) | 5 ul | 5 ul | 5 ul |
| 10 x Pfu buffer | 10 ul | 10 ul | 10 ul |
| dNTP (2.5 mM each) | 8 ul | 8 ul | 8 ul |
| H2O | 60 ul | 60 ul | 60 ul |
| Pfu | 2 ul | 2 ul | 2 ul |
| Total | 100 ul | 100 ul | 100 ul |

[0405] The PCR products from all 12 assembly were purified by electrophoresis in 1.5% agarose gel. The gel-purified VH-CDR3-CH1 building blocks from all 12 groups were then combined according to their diversity to make equal representation of each sequence in the building block library.

### Example 14

### Construction of Vk1 Chain Library

[0406] Two Vk chain libraries were assembled through overlapping oligos. One was Vk1 chain library with diversity of 2.7×10⁷, another was Vk3 chain library with diversity of 1.7×10⁷ in the CDR regions.

[0407] For Vk1 chain library assembly, 44 oligos were mixed together according to oligo diversity to make 0.5 uM oligo solution. 50 ul of PCR solutions were then prepared as described in the PCR assembly table 5. The PCR solutions were preheated at 94° C. for 2 minutes, then 25 thermal cycles of denature (94° C., 45 second), anneal (51° C., 45 second), and elongate (72° C., 1 min.) were performed, followed with a cycle of 72° C., 10 min for completion.

[0408] The assembled building blocks were further amplified by PCR by using the primers AM-141 (5′-ACCCTCGTTCCGATGCTAAGCTTCGCTGACATCCAGATGACCCAGTCT-3′) and AM-153 (5′-GAATACAGATGGTGCAGCCAC-3′). The PCR solutions were prepared by following the table 9, then 35 cycles of PCR reactions were run as described above. The PCR product of Vk1 chain library was purified by electrophoresis in 1.5% agarose gel.

TABLE 9
PCR Amplification of Vk1 chain library

| Amplification reaction | #1 | #2 | #3 |
|---|---|---|---|
| Assembly reaction | 10 ul | 10 ul | 10 ul |
| | assembly #1 | assembly #2 | assembly #3 |
| 5′ primer AM-141 (10 uM) | 5 ul | 5 ul | 5 ul |
| 3′ primer AM-153 (10 uM) | 5 ul | 5 ul | 5 ul |
| 10 x Pfu buffer | 10 ul | 10 ul | 10 ul |
| dNTP (2.5 mM each) | 8 ul | 8 ul | 8 ul |
| H2O | 60 ul | 60 ul | 60 ul |
| Pfu | 2 ul | 2 ul | 2 ul |
| Total | 100 ul | 100 ul | 100 ul |

### Example 14

### Construction of Vk3 Chain Library

[0409] For Vk3 chain library assembly, 44 oligos covering 1.7×10⁷ amino acid diversity were mixed together according to oligo diversity to make 0.5 uM oligo solution. The PCR solutions were prepared as described in the PCR assembly table 5. The PCR solutions were preheated at 94° C. for 2 minutes, then 25 thermal cycles of denature (94° C., 45 second), anneal (51° C., 45 second), and elongate (72° C., 1 min.) were performed, with a following cycle of 72° C., 10 min for completion.

[0410] The assembled building block was further amplified by PCR by using the primers AM-155 (5′-ACCCTCGTTCCGATGCTAAGCTTCGCTGAAATCGTGCTGACCCAG-3′) and AM-153 (5′-GAATACAGATGGTGCAGCCAC-3′). The PCR solutions were prepared by following the table 10, then 35 cycles of PCR reactions were run as described above. The PCR product of Vk3 chain library was purified by electrophoresis in 1.5% agarose gel.

TABLE 10
PCR Amplification of Vk3 chain library

| Amplification reaction | #1 | #2 | #3 |
|---|---|---|---|
| Assembly reaction | 10 ul | 10 ul | 10 ul |
| | assembly #1 | assembly #2 | assembly #3 |
| 5′ primer AM-155 (10 uM) | 5 ul | 5 ul | 5 ul |
| 3′ primer AM-153 (10 uM) | 5 ul | 5 ul | 5 ul |
| 10 x Pfu buffer | 10 ul | 10 ul | 10 ul |
| dNTP (2.5 mM each) | 8 ul | 8 ul | 8 ul |
| H2O | 60 ul | 60 ul | 60 ul |
| Pfu | 2 ul | 2 ul | 2 ul |
| Total | 100 ul | 100 ul | 100 ul |

### Example 14

### Construction of V-Lambda Chain Library

[0411] For V-lamda chain library assembly, 34 oligos covering 1×10⁵ amino acid diversity were mixed together according to oligo diversity. The PCR solutions were prepared as described in the PCR assembly table 5. The PCR solutions were preheated at 94° C. for 2 minutes, then 25 thermal cycles of denature (94° C., 45 second), anneal (51° C., 45 second), and elongate (72° C., 1 min.) were performed, with a following cycle of 72° C., 10 min for completion.

[0412] The assembled building blocks were further amplified by PCR by using the primers AM-163 (5′-CCTTTCTATTCTCACTCGCTGGATCC-3′) and AM-164 (5′-GGCAGCCTTGGCTGACCCAGCAC-3′). The PCR solutions were prepared by following the table 11, then 35 cycles of PCR reactions were run as described above. The PCR product of V-lambda chain library was purified by electrophoresis in 1.5% agarose gel.

TABLE 11
PCR Amplification of V-lambda chain library

| Amplification reaction | #1 | #2 | #3 |
|---|---|---|---|
| Assembly reaction | 10 ul | 10 ul | 10 ul |
| | assembly #1 | assembly #2 | assembly #3 |
| 5′ primer AM-163 (10 uM) | 5 ul | 5 ul | 5 ul |
| 3′ primer AM-164 (10 uM) | 5 ul | 5 ul | 5 ul |
| 10 x Pfu buffer | 10 ul | 10 ul | 10 ul |
| dNTP (2.5 mM each) | 8 ul | 8 ul | 8 ul |
| H2O | 60 ul | 60 ul | 60 ul |
| Pfu | 2 ul | 2 ul | 2 ul |
| Total | 100 ul | 100 ul | 100 ul |

### Example 15

### ORF Filtering for Assembled Building Blocks and Chain Libraries

[0413] The most common errors observed in the synthetic oligos were deletion and insertion, which caused gene open-reading shifts. Based on our observation, using high purity oligos alone could not guarantee a high level of ORFs in the assembled building blocks by normally giving around 50% correct open-reading frame, thereby a selective step to filter away the DNA fragments with OFR frameshifts and stop codons was setup for all building blocks and chain libraries.

### Example 15

### Construction of pMAS3 Vector for ORF Filtering

[0414] The vector pMAS3 was constructed from commercial vector pBC SK (+) (Strategen) by four steps. First step, the Xho I and Kpn I sites were deleted by digestion and subsequent blunt-end ligation; in the second step, the PciI to BamHI fragment in PBC SK(+) was replace with corresponding fragment from pABMX493 vector (Example 11); in the third step, a stuffer DNA fragment of neomycin was reversely cloned into modified PBC SK(+) vector by HindIII and BamHI; finally, a β-lactamase gene amplified from pBluescipt SK (+) was cloned into engineered pBC SK(+) vector by BamHI and SalI site. The amplification primers was Amp-411 (5′-GGTGGCGGATCCCACCCAGAAACGCTG-3′) and Amp-413 (5′-ATTAATGTCGACTTACCAATGCTTAATCAGTGAG-3′). The PMAS3 vector map is illustrated in FIG. 19.

### Example 15

### ORF Filtering of all Building Blocks and Chain Libraries

[0415] The assembled building blocks and chain libraries were first amplified by PCR as described in Example 14 to introduce HindIII and NotI at two ends. The amplification primers used for amplification are listed in the table 12.

TABLE 12
primers for amplification of building blocks and chain libraries

| Primer | Sequence | Amplification |
|---|---|---|
| AM-61 | ACCCTCGTTCCGATGCTAAGCTTCGC | VHFR building block |
| AM-149 | CGTACGGCTCGAGACAGCGGCCGCACGGGCGCAGTAGTACACTGCAGT | VHFR building block |
| AM-152 | CTCGTTCCGATGCTAAGCTTCGCTGACACTGCAGTGTACTACTGCG | VH-CDR3-CH building |
| | | blocks |
| AM-97 | CGTACGGCTCGAGACAGCGGCCGCTGTGTGAGTTTTGTCACAAGATTTGG | VH-CDR3-CH building |
| | | blocks |
| AM-141 | ACCCTCGTTCCGATGCTAAGCTTCGCTGACATCCAGATGACCCAGTCT | Vk1 chain library |
| AM-154 | CGTACGGCTCGAGACAGCGGCCGCGAATACAGATGGTGCAGCCAC | Vk1 chain library |
| AM-155 | ACCCTCGTTCCGATGCTAAGCTTCGCTGAAATCGTGCTGACCCAG | VK3 chain library |
| AM-154 | CGTACGGCTCGAGACAGCGGCCGCGAATACAGATGGTGCAGCCAC | VK3 chain library |
| AM-165 | ACCCTCGTTCCGATGCTAAGCTTCGCTCAGTCTGTGCTGACCCAGCCA | V-lambda chain library |
| AM-66 | CCGTACGGCTCGAGACAGCGGCCGCCAGCACGGTCAGCTTGGTACC | V-lambda chain library |

[0416] Each amplified building block or chain library was cloned into pMAS3, using Hind III and Not I to make β-lactamase fusions. The ligation products were purified by Qiaquick PCR Purification kit (Qiagen), then transform into XL1-Blue cells by electroporation. The transformed cells were plated out on 2YT agar plates with 2% glucose and 30 μg/ml chloramphenicol for an overnight incubation. To ensure a full coverage of library diversity, multiple electroporations were performed until the colonies number reached over at least 5 times of the actual diversity of each building block or chain library.

[0417] The cells on chloramphenicol plates were scraped off with 2YT broth/glucose (2%)/chloramphenicol (30 μg/ml) and combined. A portion of the combined cells, which covered at least 10 time of building block diversity, were plated out on 2YT agar plates with both 30 μg/ml chloramphenicol and 100 μg/ml carbenicillin for selection. A few dilution plates were also prepared to determine the output. After overnight incubation at 37° C., the survival cells on the double antibiotic selection plates were harvested. The DNA pool for each individual building block or chain library was prepared from above survival cells.

[0418] The bacterial colonies from pre-filtering and post-filtering plates were sent out for DNA sequencing. The results showed that most of the building blocks contained around 50% ORFs before chloramphenicol/carbenicillin double selection. After filtering, the percentage of antibody open-reading frames was significantly increased to over 95% (Table 13).

TABLE 13
sequence analysis for building blocks or chain libraries

| Building blocks | | | |
|---|---|---|---|
| or Chain libraies | Pre-filtering ORF | Post-filtering ORF | Complexity |
| Vk1 | 42% (57/137) | 96% (360/373) | 2.4 × 10\hat{ }7 |
| Vk3 | 28% (32/116) | 94% (456/485) | 1.6 × 10\hat{ }7 |
| Vλ | 46% (63/136) | 95% (150/157) | 10\hat{ }5 |
| VHFR (CDR1 & | 53% (300/576) | 95% (1090/1142) | 5.6 × 10\hat{ }5 |
| CDR2) | | | |
| VH-CDR3-CH1 | 83% (300/360) | 98% (1241/1259) | 2.7 × 10\hat{ }5 |

### Example 16

### Construction of Fab Libraries

[0419] The final Fab libraries were constructed by two steps. In the first step, the Vk and V-lambda light chain libraries were respectively cloned into Fab-display vectors (FIG. 15); the assembled heavy chain library from VHFR and CDR3-CH1 building blocks was then cloned into the step 1 vectors with eight k or lambda light chain libraries.

### Example 16

### Cloning of Light Chain Libraries into Fab Display Vectors

[0420] The K1, K3 and lambda chain libraries were amplified from post-filtering DNA pools by PCR as described in Example 9, using primers listed in table 14 with HindIII and KpnI sites at two ends.

TABLE 14
amplification primers for post-filtering chain libraries

| Primer | Sequence | Amplification |
|---|---|---|
| AM-141 | ACCCTCGTTCCGATGCTAAGCTTCGCTGACATCCAGATGACCCAGTCT | Vk1 chain library |
| AM-153 | GAATACAGATGGTGCAGCCAC | Vk1 chain library |
| AM-155 | ACCCTCGTTCCGATGCTAAGCTTCGCTGAAATCGTGCTGACCCAG | VK3 chain library |
| AM-153 | GAATACAGATGGTGCAGCCAC | VK3 chain library |
| AM-189 | CTCGTTCCGATGCTAAGCTTCGCTCAGTCTGTGCTGACCCAG | V-lambda chain |
| | | library |
| AM-164 | GGCAGCCTTGGCTGACCCAGCAC | V-lambda chain |
| | | library |

[0421] The PCR solutions were preheated at 94° C. for 2 minutes, then 35 thermal cycles of denature (94° C., 45 second), anneal (51° C., 45 second), and elongate (72° C., 1 min.) were performed, with a following cycle of 72 C, 10 min for completion. The PCR products of all three chain libraries were separately purified by Qiaquick PCR Purification kit (Qiagen). The purified DNA of K1, K3, and Lambda chain libraries were separately digested with HindIII and KpnI, and purified by electrophoresis in 1.5% agarose gel, thus cloned respectively into Fab-k or Fab-lambda display vectors precut with same restriction enzymes. The ligation products from all three light chain libraries were separately purified by Qiaquick PCR Purification kit (Qiagen), separately transform into XL1 blue cells by electroporation, then the transformed cells for all three libraries were separately plated out on ˜100 2YT agar plates with 2% glucose and 100 carbenicillin. The cloning processes were repeated multiple times until the colonies number reached over 5 to 10 times of the diversity of each chain library. The colonies for individual light chain library on the plates were harvested in 2YT with 2% glucose and 100 μg/ml carbenicillin. The bacterial glycerol stocks and plasmid DNA were made for each individual library.

### Example 16

### Cloning of Heavy Chain Library into Light Chain Library Vectors

[0422] The heavy chain building blocks VHFR and VH-CDR3-CH1 were amplified from post-filtering DNA pools by PCR as described in Example 14, using primers listed in table 15. The PCR solutions were preheated at 94° C. for 2 minutes, then 30 thermal cycles of denature (94° C., 45 second), anneal (55° C., 45 second), and elongate (72° C., 1 min.) were performed, with a following cycle of 72° C., 10 min for completion. The PCR products were purified by electrophoresis in 1.5% agarose gel.

TABLE 15
primers for amplification of building blocks and chain libraries

| Primer | Sequence | Amplification |
|---|---|---|
| AM-190 | TCTCACTCCGCTGGATCCGAAGTGCAGCTGCTGGAATC | VHFR building block |
| AM-148 | C-ACGGGCGCAGTAGTACACTGC | VHFR building block |
| AM-138 | GAcACTGCAGTGTACTACTGCGCC | VH-CDR3-CH building blocks |
| AM-124 | GTCGTATGGATAAGCGGCCGCTGTGTGAGTTTTGTCACAAGATTTG | VH-CDR3-CH building blocks |

The f [symbol] sec; 55 C, 45 sec; 72 C, 1 [symbol] min”; then 72 C, 10 min for completion. More than 100 PCR reactions were performed to make enough DNA for subsequent cloning into Fab display vectors.

TABLE 16
CR assembly for heavy chain library

| | |
|---|---|
| AM-190, 10 uM | 3 ul |
| AM-124, 10 uM | 3 ul |
| VHFR DNA | 2 ul |
| VH-CDR3-CH1 DNA | 2 ul |
| H2O | 40 ul |
| Pfu mastermix | 50 ul |
| Total (ul) | 100 ul |

The PCR products of heavy chain library were purified by Qiaquick PCR

[0423] Purification kit (Qiagen). The purified library DNA was digested with BamHI and NotI, and purified by electrophoresis in 1.5% agarose gel, thus cloned separately with three Fab display vectors with Vk1, VK3, V-lambda light chain library. The ligation products for Fab-K1, Fab-K3 and Fab-lambda were purified by Qiaquick PCR Purification kit (Qiagen), and separately transform into TG1 cells by electroporation. The transformed cells for all three libraries were separately plated out on more than 1000 2YT agar plates with 2% glucose and 100 μg/ml carbenicillin. The cloning processes were repeated multiple times to reach enough number of the transformants for coverage of the diversity of heavy chain library. The total complexity of PDL1 library size reached 9×10⁹, including PDL1-K1 sub-library with 3.6×10⁹,PDL1-K3 sub-library with 3.2×10⁹, and PDL1-lambda sub-library with 2.2×10⁹ (Table 17). The colonies for individual library on the plates were harvested in 2YT with 2% glucose and 100 μg/ml carbenicillin. The bacterial glycerol stocks were made for each individual library.

[0424] The bacterial colonies on 2YT plates for each individual library were sent out for DNA sequencing. The ORF % of each individual sub-libraries is listed in the table 17. The percentage of antibody open-reading frames for PDL1 library was 85%.

TABLE 17
PDL1 Fab Library

| Fab Libraries | Open Reading Frame | Complexity |
|---|---|---|
| PDL1-k1 | 84% (333/396) | 3.6 × 10⁹ |
| PDL1-k3 | 86% (596/694) | 3.2 × 10⁹ |
| PDL1-l1 | 83% (254/305) | 2.2 × 10⁹ |
| Total | 85% (1183/1395) | 9 × 10⁹ |

### Example 17

### Preparation of Phage Display Library of PDL1

[0425] For individual sub-library, 3 to 5 liters of library TG1 cells were inoculate in 2YT/2% glucose/100 μg/ml carbenicillin, with starting OD₆₀₀=0.1. The library cells were grew at 37° C. with 250 rpm shaking until OD₆₀₀ reached to ˜0.8-0.9. The library cells were then infected with GMCT helper phages (MOI=10) for 1 hour at 37° C. The infected TG1 cells were grown in 2×YT/carbenicillin/Kanamycin at 22° C. for overnight. The overnight culture supernatants were harvested by centrifugation at 8000×g for 60 minutes, and filtered though 45 um low binding membrane filter (Corning). The phagemid particles were precipitated by PEG/NaCl from culture supernatants, and resuspended in PBS. The PEG-precipitation was repeated once. The phage concentration was determined by OD₂₆₈ measurement, assuming 1 unit at OD₂₆₈ is approximately 5×10¹² phage particles/ml, and confirmed by colony formation assay on 2YT plate with 2% glucose/100 μg/ml carbenicillin. Library phage stocks were made with 15% glycerol, and stored at −80° C.

### Example 18

### PDL1 Phage Library Panning Against Multiple Antigen Proteins

[0426] Antigen protein was coated on Maxisorp well stripe (Nunc-Immuno Modules) at a concentration of 1-10 μg/ml for overnight at 4° C. Multiple wells of antigen were prepared for each library. 5% milk in PBS was used to block the coated wells at RT for 1-2 hour. After wash with PBS, 100 ul of phage library solution/well (usually 1-5×10¹² in 2% milk-PBSK) was added into 4 parallel wells, and incubate for designed length of time (usually 1-2 hours). After several washing with PBST and PBS, the bound phages was eluted from the wells with fresh-prepared 1.4% triethylamine in ddH2O (10 min incubation at room temperature), followed immediately with neutralization by adding 50 ul of 1M Tris-HCl (pH 6.8).

[0427] For some antigens, 1 ml of antigen protein was coated into immunotube at a concentration of 10 to 500 μg/ml for overnight at 4° C. The volume of block, wash and elution solutions were increased accordingly.

[0428] The eluted, enriched phage pool was further amplified through following steps. First, TG1 cells were infected with eluted phages at 37° C. for 1 hour, then plated out on 2YT agar plates with 2% glucose and 100 μg/ml carbenicillin for overnight culture. Thus TG1 cells harboring enriched phagemid library were harvested from the plates, and infected with helper phage GMCT for 1 hour. The Fab-display phages were then generated from those TG1 cells harboring both library phagemids and GMCT helper phage genome by overnight growth in 2×YT/carbenicillin/Kanamycin at 22° C. The phagemid particles were purified from overnight culture supernatants by precipitation with PEG/NaCl, and re-suspended in PBS. The PEG-precipitation was repeated once. The phage concentration was determined by OD₂₆₈ measurement.

[0429] With amplified first round phages, the panning process as described above was repeated twice for further enrichment of PCSK9-binding phages. The eluted phages from the third round panning were used to infect TG1 cells. The TG1 cells harboring phagemids from third round panning were picked from 2YT agar plates for Fab ELISA screening assay.

### Example 19

### Fab ELISA Screening for Binders

[0430] Over 10000 clones from third round panning were picked for each antigen by MegaPix Picking Robot (Genetix), and inoculated into 384-well plates with 60 ul of 2YT/2% Glucose/carbenicillin for overnight culture at 30° C. with 450 rpm shaking. The duplicated plates were made by transferring-1-3 ul overnight culture from each well into new plates with 50 ul/well of 2YT/0.1% Glucose/carbenicillin. The duplicated plates were incubated in a shaker at 30° C. for 6 hours, then 10 μl/well of IPTG was added for final concentration of 1 mM. After overnight culture at 22° C., the soluble Fab in IPTG-induction plates were released by adding lysozyme into each well.

[0431] To detect the antigen binding activity of soluble Fabs generated from above experiment, the antigen plates were generated by overnight coating of 5 μg/ml antigen. After blocking with milk-PBS and wash with PBST, 15-20 ul of Fab samples from IPTG-induction plates was transferred into antigen plates for 1-2 hours incubation at room temperature. The plates were washed 5 times with PBS-T, and added with 1:2000 diluted goat anti-human Kappa-HRP (SouthernBiotech Cat. No. 2060-05) or 1:10,000 diluted goat anti-human Fab-HRP in 5% MPBS for 1 hour incubation. After washing away unbound HRP-conjugates with PBST, the substrate solution QuantaBlu WS (Pierce 15169) was then added to each well and incubated for 5-15 mins. The relative fluorescence units (RFU) of each well was measured to determine the Fab binding activity by using excitation wavelength 330 nm and emission detection wavelength 410 nm.

### Example 20

### Isolation of Anti-Human PCSK9 Antibodies from PDL1 Library

[0432] The ELISA results showed 30 to 80% clones from third round panning of individual PDL1 sun-libraries bound to antigen PCSK9. The positive clones were then sent out for DNA sequencing. Total 128 unique Fab sequences were identified from those PDL1 library pannings.

[0433] FIG. 20 shows the ELISA data that illustrates the binding of PDL1 Fabs to human PCSK9.

[0434] FIG. 21A shows the sequences of VH from a panel of anti-human PCSK9 antibodies isolated from PDL1 library panning.

[0435] FIG. 21B shows the sequences of VK from a panel of anti-human PCSK9 antibodies isolated from PDL1 library panning.

### Example 21

### Isolation of Anti-Mouse PCSK9 Antibodies from PDL1 Library

[0436] FIG. 22 shows the ELISA data that illustrated the binding of PDL1-Fabs to mouse PCSK9.

[0437] FIGS. 23A and 23B show the sequences of VH from a panel of anti-mouse PCSK9 antibodies isolated from PDL1 library panning.

[0438] FIGS. 23C and 23D show the sequences of VK from a panel of anti-mouse PCSK9 antibodies isolated from PDL1 library panning.

### Example 22

### Isolation of Anti-Human her3 Antibodies from PDL1 Library

[0439] FIG. 24 shows the ELISA data that illustrated the binding of PDL1-Fabs to human Her3 protein.

[0440] FIGS. 25A and 25B show the sequences of VH from a panel of anti-human Her3 antibodies isolated from PDL1 library panning.

[0441] FIGS. 25C and 25D show the sequences of VK from a panel of anti-human Her3 antibodies isolated from PDL1 library panning.

### Example 23

### Isolation of Anti-Mouse IL13R-Fc Antibodies from PDL1 Library

[0442] FIG. 26 shows the ELISA data that illustrated the binding of PDL1-Fabs to mouse IL13R-Fc protein.

[0443] FIGS. 27A and 27B show the sequences of VH from a panel of anti-mouse IL13R-Fc antibodies isolated from PDL1 library panning.

[0444] FIGS. 27C and 27D show the sequences of VK from a panel of anti-mouse IL13R-Fc antibodies isolated from PDL1 library panning.

### Example 24

### Isolation of Anti-Mouse EPHA2 Antibodies from PDL1 Library

[0445] FIG. 28 shows the ELISA data that illustrated the binding of PDL1-Fabs to mouse EPHA2 protein.

[0446] FIG. 29A shows the sequences of VH from a panel of anti-mouse EPHA2 antibodies isolated from PDL1 library panning.

[0447] FIG. 29B shows the sequences of VK from a panel of anti-mouse EPHA2 antibodies isolated from PDL1 library panning.

### Example 25

### Isolation of Anti-HSV Viral Protein gE Antibodies from PDL1 Library

[0448] FIG. 30 shows the ELISA data that illustrated the binding of PDL1-Fabs to HSV viral protein gE protein.

[0449] FIG. 31 shows the sequences of VH and Vk from a panel of anti-HSV viral protein gE antibodies isolated from PDL1 library panning.

### Example 26

### Isolation of Anti-Human TrkA Antibodies from PDL1 Library

[0450] FIG. 32 shows the ELISA data that illustrated the binding of PDL1-Fabs to TrkA protein.

[0451] FIG. 33 shows the sequences of VH, Vk, and Vλ from a panel of anti-TrkA antibodies isolated from PDL1 library panning.

### Example 27

### Fab Protein Expression and Purification

[0452] 50 ml of overnight cultures for individual clones in 2YT/2% glucose/Carbenicillin 100 μg/ml were grown in 37° C. shaker incubator. In the second day, 750 mL to IL of 2YT/0.1% glucose/100 ug/mL Carbenicillin was inoculated for each clone by transferring 5-10 ml of the overnight culture. The cultures were grown at 30° C. with shaking for approximately 3-4 hrs until OD₆₀₀˜1. IPTG was added to the culture to reach the final concentration of 0.1-0.5 mM. After overnight IPTG induction at 22° C., the cells pellets were collected by centrifugation at 10,000 rpm for 10-15 mins, to proceed for periplasmic preparation.

[0453] Soluble Fabs were extracted from cell periplasm. The periplasmic preparation was performed as following. The TG1 pellet was re-suspend in 20 mL pre-chilled PPB buffer (20% Sucrose+2 mM EDTA+30 mM Tris, pH=8), and incubated on ice for 1 hour. The supernatant with soluble Fab was collected by centrifugation. Subsequently, the cell pellet was further re-suspended in 20 mL pre-chilled 5 mM magnesium sulfate with 1 hour incubation on ice. Two supernatants were combined for further Fab purification.

[0454] The supernatant from periplasmic preparation was loaded into a 1 ml protein-G column (HiTrap, GE healthcare) for Fab purification. After column wash with 50 ml PBS, Fab protein was eluted with 0.3M acetic acid, pH3 buffer. The eluted fractions were collected, and neutralized with 0.5 volume of 1M Tris-HCl, pH9 buffer. The Fab samples were buffer-exchanged to PBS, and a small portion was injected into Size Exclusion HPLC to check protein purity, and used for Fab ELISA assay. We have completed the Fab expression and purification for all 128 PCSK9 hits. Overall summary of Fab yields is ˜2 mg/L with high degree of variability, from less than 1 mg/L to well over 10 mg/L. The ELISA assay results confirmed all 128 Fab bound to human PCSK9 antigen.

### Example 28

### Biacore-Based PCSP9-LDL Receptor Interaction Assay

[0455] The LDL-Receptor (LDLR) and EGF_AB domain of LDLR (this domain involves the interaction with PCSK9) were immobilized on two different flow cells in the same CM5 chips by coupling of amine groups of LDLR or EGF_AB domain onto carboxylated surfaces of sensor chips according to the instruction of Amine Coupling Kit (GE/Biacore). Briefly, LDLR and EGF_AB were diluted to 20 μg/ml in pH 4.5 10 mM Acetate buffer and injected to two flow cells on the same CM5 chip to achieve an immobilization level of ˜1500 RU. 100 nM human PCSK9 alone in running buffer (1×HBSP with 0.1 mM CaCl₂) was injected into the flow cells (at 20 ul/min for 2.5 min) to measure the interaction of PSK9 with LDLR and EGF_AB domain. After injection, the flow cells were regenerated by 10 mM HCl.

[0456] To determine the impact of the binding of Fab antibody to PCSK9, each purified Fab sample (1 uM in the running buffer) was incubated with human PCSK9 at the concentration of 100 nM for 30 min at room temperature. The prepared PCSK9/Fab samples were injected into the CM5 chip, and binding of PCS9/Fab complex was measured. As shown in FIG. 34, human PCSK9 alone bound to both LDLR and EGF_AB domain, When the binding of Fab antibody did not inhibit the PCSK9-LDLR interaction, the binding of PCS9/Fab complex to LDLR or EGF_AB resulted in higher binding RU then PCSK9 alone. Among the Fab antibodies tested, AX1, AX9 and AX114 Fabs showed significant inhibition on PCSK9 binding to LDLR or EGF_AB domain.

### Example 29

### Biacore-Based Competition Assay for Binding Epitope Binning

[0457] Human PCSK9 protein was immobilized on CM5 chip by coupling primary amine groups of PCSK9 onto carboxylated surfaces of sensor chips according to the instruction of Amine Coupling Kit (GE/Biacore). Briefly, hPCSK9 protein was diluted to 50 μg/ml in pH 5.5/10 mM Acetate solution, and was injected onto the NHS/EDC activated surface to achieve an immobilization level of 1000-2000 RU, followed with surface inactivation by injection of Ethanolamine. The Fab or IgG protein in FIBS-P buffer) was then injected for 3 minutes binding, followed with 5 minutes dissociation. In the binding epitope binning assay, two flow cells were immobilized with same amount of hPCSK9 protein to detect the binding competition between antibody 1 and antibody 2. On the flow cell 1, antibody 1 was injected twice to occupy its binding epitope, antibody 2 was then injected for binding. The flow cell 2 was setup as a reference, only antibody 2 was injected onto it for binding. To determine whether there was competition between antibody 1 and antibody 2, the sensorgrams of antibody 2 from both flow cells were overplayed. When two antibodies competed, pre-occupation of antibody 1 could significantly or totally inhibit the antibody 1 binding. Cross competition for 19 antibodies from PDL1 library was completed, and 3 independent epitope bins on human PCSK9 were identified, see table 18.

TABLE 18

| Bin 1 binder | Bin 2 binder | Bin 3 binder |
|---|---|---|
| AX114 | AX1 | AX116 |
| AX132 | AX9 | |
| AX139 | AX40 | |
| AX212 | AX56 | |
| AX213 | AX115 | |
| AX210 | AX118 | |
| AX211 | AX119 | |
| AX212 | AX188 | |
| | AX189 | |
| | AX191 | |

### Example 30

### Biacore Assay for Affinity Measurement

[0458] To determine the binding affinity of Fab to PCSK9, Fab capture-based bioacore assay was developed. First, goat anti-Fab IgGs were immobilized onto CM5 chip by amine coupling as described above. The anti-Fab IgGs were diluted to 200 μg/ml in pH 5/10 mM Acetate solution, and injected onto the NHS/EDC activated surface to achieve an immobilization level of ˜10000 RU, followed with surface inactivation by injection of Ethanolamine. Then Fab samples at concentration of 2 μg/ml in FIBS-P running buffer were injected for 3 mins at flow speed of 20 ul/min, followed with K-injection (3 min injection for association and 6 mins for dissociation) of PCSK9 at concentration of 10 to 100 nM. The sensorchip surface was regenerated by 30 second injection of 100 mM phosphoric acid. The binding sensorgrames were fitted with 1:1 Langmuir binding model to determine the binding affinity. We have randomly picked 34 Fabs panned from PDL1 library and 16 Fabs from a control library to compare the affinity distribution. The data in FIG. 35 shows that the Fabs from PDL1 library had affinity of a range of 2-50 nM to PCSK9 protein, which was comparable to that of the control library.

[0459] In the following examples, reference is made to various provisional applications each of which is incorporated by reference in its entirety. Specifically, each of Ser. No. 61/256,720 ('720), Filed Oct. 30, 2009 and 61/323,117 ('117), Filed Apr. 12, 2010 (Collectively Attorney Docket No, MRL-ACV-00028) is incorporated by reference in its entirety. Likewise, each of Ser. Nos. 61/256,732 ('732) filed Oct. 30, 2009 and 61/323,148 ('148) filed Apr. 12, 2010 (Collectively Attorney Docket No, MRL-ACV-00029) is incorporated by reference in its entirety

### Example 31

### AX114 Optimization Library Design

### Example 31-1

### Antibody Structure Modeling for AX114 Fv

[0460] The AX114 antibody structure was built by using Abmaxis antibody structure prediction tool which have been described in U.S. Pat. No. 117,096 B2. The structure templates for each fragment, chain and Fv were selected by remote homology modeling. The predicted AX114 Fv structures were sorted by the energy scoring function implemented in CONGEN. The top 300 Fv structures were clustered into 6 clusters based on backbone Ca with 1.5 A cutoff. The Fv confirmations with the lowest energy score in each cluster are selected to stand for that cluster.

### Example 31-2

### Mutation Effects on AX114 Fv Folding Stability

[0461] For each selected AX114 Fv structure described in EXAMPLE 31-1, the mutation effects on the Fv folding stability have been used to computationally screen the possible mutations at interested regions, such as CDRs. The antibody folding stability is evaluated by the unfolding free energy. The unfolding free energy is defined as the antibody free energy change between the unfolded and folded state. The higher the unfolding free energy, the more stable the antibody structure.

[0462] In the mutation process, the increase of the unfolding free energy indicates the mutation stabilizes the Fv structure. On the other hand, the decrease of the unfolding free energy indicates the mutation destabilizes the Fv structure. An outline of the calculation of the unfolding free energy change during the mutation process is as follow:

[0463] The hydrogen atoms were added onto the modeled Fv structure using VMD. The energy minimization on the hydrogen atoms were carried out using NAMD. The energy minimized structure is the folded state for the wild type antibody. The mutant was generated using “SCWRL” based on the modeled Fv structure. The hydrogen atoms were added using VMD. The energy minimization was carried out on the mutated residue side-chains and the hydrogen atoms using NAMD. The energy minimized structure is the folded state for the mutant antibody.

[0464] As for the unfolded state, first, it is assumed that the unfolded state devoid of any interaction between residues. The unfolded state is simply modeled as the residues under mutations exposed to the solvent. Then, the charge-charge interaction in the unfolded state could be added in using Gaussian-chain model

[0465] The unfolding free energy for wild type antibody or mutant was obtained by subtracting the free energy for folded state from the one for unfolded state.

[0466] The change of unfolding free energy during the mutation process was obtained by subtracting the unfolding free energy for wild type from the one for mutant. Positive change means the mutant stabilize the Fv folded structure.

[0467] According to the inventors' calculation, both polar and non-polar contributions to the free energy of each state are considered. The polar contributions are obtained by solving Poisson-Boltzmann equation using the finite difference method with a grid size ˜0.3 Å in APBS.

[0468] The non-polar part is calculated to use the Apolar module in APBS, which includes both cavity creation term from scaled particle theory and the dispersion term from weeks-chandler-Anderson framework. Amber force field is used to set the parameters for each antibody atom including charges and radii.

### Example 31-3

### Mutation Effect on AX114 Binding Affinity to hPCSK9

[0469] Selected AX114 Fv structures (from Example 31-1) were docked with X-ray structure of hPCSK9 using Rosetta_Dock to predict the complex confirmation. The sampled complex confirmations were sorted by the Rosetta score and clustered according to the antibody backbone Ca. The confirmation with the lowest score in the biggest cluster was selected as the complex confirmation to screen the mutation effect on the AX114 binding affinity to hPCSK9.

[0470] The binding free energy is defined as the difference of free energy between the complex and separate proteins. Both polar and non-polar contributions were calculated using APBS with Amber force field.

### Example 31-4

### Mutation Scanning on AX114 CDRs

[0471] Multiple runs of mutation scanning were carried out on all 6 AX114 CDRs. It started with the single-mutation scanning. Except Cys, all other 19 amino acid types were evaluated at each CDR residue site. Both folding (EXAMPLE 31-2) and binding effects (EXAMPLE 31-3) were calculated. The mutations with equal, better and slightly worse on AX114 Fv folding and binding stability than wild type residue were selected to go to the multiple-mutation scanning. The multiple-mutation scanning was carried out on the interested regions or the regions structurally interacting with each other. The mutation scanning provided the profile of the possible mutation at the interested target site.

### Example 31-5

### AX114 CDRs Sequence Database Profiling

[0472] Each AX114 CDR sequence and 6 amino acid residues from the adjacent framework regions (3 front and 3 after) was used as lead sequence to search the antibody database and select the hit amino acid sequence by the remote homology. Variant profile was built to list all variants at each position based on the hit library and filtered with certain cutoff value to reduce the size of the resulting hit variant library within computational or experimental limit.

### Example 31-6

### Mutation Sorting on AX114 CDRs Using Rosetta Design

[0473] Rosetta_design was also used to evaluate the mutation effect on the AX114 folding stability. Two kinds of calculations were carried out: one with the GB calculation (electrostatic interaction) and one without. The scanning started with each CDR alone, then each chain, then Fv. The profile from Example 31-4 and example 31-5 were used as initial input file to provide the choices for each interested position. The mutations were ranked by the popularity and Rosetta score.

### Example 31-7

### AX114 Optimization Libraries

[0474] By combining the possible mutation profiles from Example 31-4, -5 and -6 and filtered with certain cutoff value, 7 optimization libraries were designed to target the VH chain, VL chain, VH_CDR3, VH_CDR1&2, VL_CDR3, VL_CDR1&2, and both VH&VL, and showed in FIG. 4-10. Refer to one of the '720 and/or '117 applications.

### Example 32

### Optimization Libraries of Antibody AX114

[0475] Two types of libraries were constructed using the adapter-directed phage display technology as described by Wang et al., Journal of Molecular Biology 2010, 395:1088-1101, using either pre-existed building blocks libraries from PDL1 library, or specific designed libraries based on AX114 structure modeling. Total 10 optimization libraries were constructed for AX114 antibody identified from PDL1 library, as listed Table 19.

TABLE 19
AX114 optimization libraries

| library | VH | Vk | library size (clones) |
|---|---|---|---|
| MABL81 | AX114 WT | Vk1 library from PDL1 | 7.80E+08 |
| MABL82 | AX114 WT | Vk3 library from PDL1 | 2.00E+08 |
| MABL83 | AX114 WT | Structure-based Vk library | 2.10E+08 |
| MABL85 | Structure-based VH-CDRs | AX132 (AX114 variant) | 1.10E+09 |
| | library | | |
| MABL86 | VH-CDR1, 2 library from | AX132 | 5.80E+07 |
| | PDL1 | | |
| MABL87 | AX114-CDR3 library | AX139 (AX114 variant) | 4.10E+08 |
| MABL88 | Structure-based VH-CDR2,3 | Structure-based Vk-CDR1,2,3 | 5.20E+08 |
| | library | library | |
| MABL89 | VH-CDR 1, 2 library | AX139 | 3.80E+08 |
| MABL90 | AX114 WT | Structure-based AX139 Vk3- | 1.70E+08 |
| | | CDR1 and CDR2 library | |
| MABL92 | AX114 WT | Structure-based AX139 Vk3- | 2.40E+08 |
| | | CDR3 library | |

[0476] Library construction process was described as following. Briefly, the AX114 vector DNA was prepared from TG1 bacterial cells using HiPure Plasmid Maxiprep kit (Invitrogen). AX114 or its variant vector DNA was digested with restriction enzymes BamHI and KpnI for cloning full Vk libraries, BamHI and BbsI cut for cloning Vk CDR1 and CDR2 libraries, and BbsI and KpnI cut for cloning Vk CDR3 libraries. To make the heavy chain libraries, the AX114 and its variant vector DNA were digested with restriction enzymes HindIII and XhoI for cloning full VH libraries, with HindIII and PstI cut for cloning VH-CDR1 and CDR2 libraries, and cut with PstI and XhoI for cloning VH-CDR3 libraries. The digested AX114 and its variant vector DNA were purified by electophoresis in 1% Agarose gel for library ligation and construction.

[0477] PCR reaction was used to amplify the VH CDRs libraries from either pre-existed PDL1 library or structure-based new libraries. The PCR primers were listed in the Table 20.

TABLE 20
primers for amplification of VH-CDRs libraries

| Primer | Sequence | Amplification |
|---|---|---|
| AM-190 | TCTCACTCCGCTGGATCCGAAGTGCAGCTGCTGGAATC | VH-CDR1 and CDR2 library |
| AM-148 | ACGGGCGCAGTAGTACACTGC | VH-CDR1 and CDR2 library |
| AM-152 | CTCGTTCCGATGCTAAGCTTCGCTGACACTGCAGTGTACTACTGCG | VH-CDR3 libraries |
| AM-150 | GCCTTTGGTGCTTGCGCTCGAGACAGTCACCAGCGTACCCTGACC | VH-CDR3 libraries |
| AM-155 | ACCCTCGTTCCGATGCTAAGCTTCGCTGAAATCGTGCTGACCCAG | VK3 chain library |
| AM-153 | GAATACAGATGGTGCAGCCAC | VK3 chain library |
| AM-260 | CCAGCCACCCTGTCTCTGTCTC | Vk3 CDR1 and CDR2 |
| | | libraries |
| AM-261 | GAAGTCGGTGCCAGAACCAGATC | Vk3 CDR1 and CDR2 |
| | | libraries |
| AL-521 | TCTCTGGAACCAGAAGACTTCGCCGTGTACTACTGCCAG | Vk3 CDR3 libraries |
| AL-522 | ACGTTTGATCTCCACTTTGGTACCACCACCGAAA | Vk3 CDR3 libraries |

[0478] The PCR programs were as following: 94 C, 2 min preheat; 30 cycles of “94 C, 45 see; 55 C, 45 sec; 72 C, 1 min”; then 72 C, 10 min for completion. 20 to 60 PCR reactions were performed for each library to make enough DNA for subsequent cloning into AX114 and its variant vectors. The PCR-amplified DNA was purified using Qiaquick PCR purification Kit (Qiagen), then digested with corresponding restriction enzymes as described above. The ligation reaction was carried out for overnight at 16° C., with the following reaction mixture: 10-20 ug vector DNA, 2-4 ug insert library DNA, 4000-8000 U T4 DNA ligase in 1× ligation buffer (New England BioLabs). The ligation products were purified by Qiaquick PCR Purification kit (Qiagen), and transform into TG1 cells by electroporation with a mix of 1.2 ug DNA and 200 ul of electro-competent cells for each. The electroporations were repeated to achieve enough colony formation unit (cfu). The transformed cells plated out on 10 2YT agar plates with 2% glucose and 100 ug/ml carbenicillin. The complexity of each library is listed in the Table 18.

[0479] All AX114 libraries were panned against PCSK9 antigen for 3-6 rounds as described in the Example 2. Refer to one of the '720 and/or '117 applications. The clones were picked for Fab ELISA screening as described in the Example 3. Refer to one of the '720 and/or '117 applications. The PCSK9 binding clones were expressed in TG1 cells for Fab secretion, Purified Fab proteins (Example 4—Refer to one of the '720 and/or '117 applications) were run on Biacore for affinity measurements (see Example 15—Refer to one of the '720 and/or '117 applications). From these libraries, total of 135 AX114 variants (listed in Table 20) that bond to human PCSK9 were identified, including AX132.

TABLE 20
sequence ID for AX114 and its variants

| Sequences | SEQ ID |
|---|---|
| VH | 1-135 |
| VK | 136-174 |
| VH_CDR1 | 175-268 |
| VH_CDR2 | 269-370 |
| VH_CDR3 | 371-423 |
| VK_CDR1 | 424-431 |
| VK_CDR2 | 432-436 |
| VK_CDR3 | 437-467 |

> (AX132 VH)
EVQLLESGGGLVQPGGSLRLSCKASGYTFSSYGMYWVRQAPGKGLEWIGW
IDPGSGGTKYNEKFKGKATISRDNSKNTLYLQMNSLRAEDTAVYYCARER
YGYYFDYWGQGTLVTVSSAS
>(AX132 VK)
EIVLTQSPATLSLSPGERATITCRASQYVGSYLNWYQQKPGQAPRLLIYD
ASNRATGIPARFSGSGSGTDFTLTISSLEPEDFAVYYCQVWDSSPPVVF
GGGTKVEIK

[0480] The sequence changes in the CDR regions for all XA114 variants are illustrated in FIGS. 11 and 12 as set forth in the '720 and/or '117 application.

### Example 33

### Cross Phage/Yeast Display for Ax114 Engineering

[0481] The cross-species display using the same display vector provides the possibility to display a library that can shuttle between phage and yeast surfaces, therefore the large size library can be first selected in phage display format, and then the enriched library be directly processed to yeast display and FACS sorting without the need of molecular cloning. MABL85 VH-maturation library (with diversity in all three CDRs) was cloned into this cross-display vector, see Wang et al., Journal Molecular Biology 2010, 395: 1088-1101. This affinity maturation library was display on phage, and panned against PCSK9 for one round. Then the first round panning-enriched VH library was transformed into S. cerevisiae KQP600 cells for yeast display, see Wang et at., Journal of Immunological Methods 2010, 354:11-19. 18 unique VH sequences with 2-10 folds affinity improvements were isolated from 5 rounds of FACS shorting.

[0482] Taking the advantage that the cross-species display vector worked for Fab secretion in both yeast and E. coli cells, we extracted the maturation library DNA from the yeast cells post 5 rounds of sorting and transformed them into E. coli TG1 cells that have higher growth rate and shorter culture time. After overnight incubation on agar plates, single TG1 colonies were picked, grown in a 96-deep-well plate, and induced overnight with IPTG for Fab expression. The Fab-containing supernatants were subjected to affinity characterization. In this process, affinity measurements were conducted on ProteOn XPR36 (BioRad), a protein interaction array system that can generate simultaneous analysis of up to six ligands with up to six analytes. The Fab-containing supernatants were flown through a GLC sensorchip immobilized with anti-Fab antibody (Sigma). Once the Fab molecules were purified and captured on the sensorchip, the antigen protein solutions of 5 different concentrations were injected simultaneously to generate real time sensorgrams for the kinetic analysis of each Fab sample. With this process, we were able to complete affinity measurements for 96 Fabs in 1 day.

[0483] FIG. 13 illustrates the process of affinity measurement for yeast hits in E. coli system. The library DNA was extracted from post-sorting yeast cells, and directly transformed into bacterial TG1 cells. The isolated colonies were picked up into a 96-deep-well plate, grown and induced overnight with 0.5 mM IPTG. The resulting culture supernatants were directly injected into ProteON XPR36 (BioRad) for Fab affinity characterization. The Fab-containing supernatants were flown through a GLC sensorchip immobilized with anti-Fab antibody (Sigma). Once the Fab molecules were purified and captured on the sensorchip, the antigen protein solutions of 5 different concentrations were injected simultaneously to generate real time sensorgrams for the kinetic analysis.

### Example 34

### Fab Domain Thermostability

[0484] Thermostabilities of Fabs and Fab domains were determined from DSC experiments by analysis and deconvolution of excess heat capacity function in Origin 5.0. The melting transition temperatures (Tm) for Fabs or Fab domains are indicated in Table 21. The Tm of various Fabs and Fab domains range from 72 to 78° C. for PDL1 derived antibodies, which is consistent with well folded antibody Fab region.

TABLE 21
Thermostabilities of AX114 variants

| IgG | Fab domain (Tm, ° C.) |
|---|---|
| Ax114-IgG1 | 76.7 |
| AX114-IgG2 | 76.5 |
| AX132-IgG2 | 77.4 |

### Example 35

### Anti-Pcsk9 Monoclonal Antibodies Expressed and Purification from Mammalian Cells

[0485] The DNA sequence encoding the Vk1 or VK3 light chain variable region was amplified by polymerase chain reaction from plasmid template. The product of this amplification was cloned into plasmid pVUNSAGS-FB-LCK that had been previously digested with Fsp1 and Bmt1, using the InFusion cloning system (Clontech). The resulting plasmid was verified by DNA sequencing across the variable region. Endotoxin-free plasmid preparations were made using the Qiagen Endo-Free plasmid maxiprep kit. The DNA sequence encoding the heavy chain variable region of VH3 was amplified by polymerase chain reaction, and the amplified product was cloned into plasmid pV1 JNSA-BF-HCG2M4 that had been previously digested with Fsp1 and Bmt1. The resulting plasmid was verified by DNA sequencing across the variable region. Endotoxin-free plasmid preparations were made using the Qiagen Endo-Free plasmid maxiprep kit.

[0486] The plasmid DNA for heavy and light chain was mixed at 1:3, and co-tranfected into HEK293 cells. After 5-7 days culture, the supernatant was harvested and proceeded for Protein-A column purification. Briefly, the cell free supernatant was loaded on to protein-A column pre-equilibrated with three column volume of 20 mM Tris-HCl 047.0 at a flow rate of 5.0 mL/min. The column was washed with three column volumes of the 20 mM Tris-HCl pH7.0 followed by a five column volume wash with 20 mM Tris-HCl pH7.0 containing 1M NaCl to remove the host cell proteins. The anti-PCSK9 antibody was eluted with five column volume of 100 mM Glycine, 100 mM Arginine pH 3.0 and immediately neutralized with 1M Tris-HCl pH8.0.

### Example 36

### Anti-Pcsk9 Monoclonal Antibodies Expressed and Purification from Glycoengineered Pichia Pastoris

[0487] Anti-PCSK9 IgG2 monoclonal antibodies expressed in glyco-engineered Pichia pastoris GFI 5.0 host YGLY8316, which is capable of transferring terminal galactose at its complex N-linked glycan. Anti-PCSK9 heavy and light chains were codon optimized and expressed under methanol tightly inducible promoter AOX1 using Saccharomyces cerevisiae alpha mating factor presequence as secretion signal sequence. Anti-PCSK9 antibody from Pichia pastoris GFI 5.0 host YGLY8316 was captured from cell free supernatant media by affinity chromatography using MabSelect™ medium from GE Healthcare (Cat. #17-5199-01). The cell free supernatant was loaded on to Mabselect column (XK 16/20, 1.6 cm×10.0 cm) pre-equilibrated with three column volume of 20 mM Tris-HCl pH7.0 at a flow rate of 5.0 mL/min. The column was washed with three column volumes of the 20 mM Tris-HCl pH7.0 followed by a five column volume wash with 20 mM Tris-HCl pH7.0 containing 1M NaCl to remove the host cell proteins. The anti-PCSK9 antibody was eluted with five column volume of 100 mM Glycine, 100 mM Arginine pH 3.0 and immediately neutralized with 1M Tris-HCl pH8.0. AX213 antibody was well expressed in Pichia, yielding ca. 300-700 mg/L of protein in small scale fermentation process. The yield for AX114 was 5 mg/L in small scale.

[0488] Strong Cation Exchange Chromatography employing Source 30S resin from GE Healthcare (Cat #17-1273-02) was used as the second step purification to remove the clipped species and aggregates. Mabselect pool of the anti-PCSK9 antibody was 5× diluted with 25 mM Sodium acetate pH5.0 and loaded on to the Source 305 column pre-equilibrated with three column volume of 25 mM Sodium acetate pH5.0. After loading, the column was washed with three column volume of the 25 mM Sodium acetate pH5.0 and elution was performed by developing a linear gradient over ten column volume ranging from 100 mM to 150 mM Sodium chloride in 25 mM Sodium acetate pH5.0. The fractions containing good assembled anti-PCSK9 antibody was pooled together. The Source 30S pooled fractions that contained the anti-PCSK9 antibody was buffer exchanged into the formulation buffer containing 6% Surcose, 100 mM Arginine, 100 mM Histidine pH6.0 (HyClone® Cat # RR10804.02) and sterile filtered using PES (PolyEtherSulfone) membrane filter and stored @4° C. until release.

### Example 37

### Biacore Assay for Affinity Measurement

[0489] To determine the binding affinity of Fab to PCSK9, Fab capture-based Biacore assay was developed. First, goat anti-Fab IgGs were immobilized onto CM5 chip by amine coupling as described above. The anti-Fab IgGs were diluted to 200 μg/ml in pH 5/10 mM Acetate solution, and injected onto the NHS/EDC activated surface to achieve an immobilization level of ˜10,000 RU, followed with surface inactivation by injection of Ethanolamine. Then Fab samples at concentration of 2 μg/ml in HBS-P running buffer were injected for 3 mins at flow speed of 20 ul/min, followed with K-injection (3 minutes injection for association and 6 minutes for dissociation) of PCSK9 at concentration of 10 to 100 nM. The sensor chip surface was regenerated by 30 second injection of 100 mM phosphoric acid. The binding sensorgrams were fitted with 1:1 Langmuir binding model to determine the binding affinity. The Fab affinities of AX114, AX132 and other variants are shown in Table 22.

TABLE 22
Fab binding affinity

| Fabs | Binding affinity to human PCSK9 | | |
|---|---|---|---|
| Name | ka (1/Ms) | kd (1/s) | KD (M) |
| AX114 | 7.17E+04 | 3.48E−03 | 4.85E−08 |
| AX132 | 9.11E+04 | 1.08E−03 | 1.18E−08 |
| AX137 | 1.07E+05 | 2.08E−03 | 1.95E−08 |
| AX139 | 8.97E+04 | 1.18E−03 | 1.32E−08 |
| AX201 | 1.31E+05 | 1.02E−03 | 7.82E−09 |
| AX202 | 1.09E+05 | 1.02E−03 | 9.43E−09 |
| AX204 | 2.34E+05 | 9.87E−04 | 8.39E−09 |
| AX205 | 1.04E+05 | 9.72E−04 | 9.45E−09 |
| AX206 | 1.22E+05 | 1.03E−03 | 8.42E−09 |
| AX207 | 1.11E+05 | 1.00E−03 | 9.23E−09 |
| AX208 | 9.84E+04 | 2.59E−03 | 2.64E−08 |
| AX209 | 1.12E+05 | 1.07E−03 | 9.60E−09 |
| AX210 | 1.72E+05 | 2.87E−04 | 1.67E−09 |
| Ax211 | 1.97E+05 | 3.29E−04 | 1.67E−09 |
| AX212 | 1.59E+05 | 2.33E−04 | 1.47E−09 |
| AX213 | 2.43E+05 | 3.29E−04 | 1.37E−09 |
| AX214 | 1.92E+05 | 3.19E−04 | 1.60E−09 |
| AX215 | 1.16E+05 | 3.76E−04 | 3.47E−09 |
| AX216 | 1.15E+05 | 2.88E−04 | 2.51E−09 |
| AX217 | 1.38E+05 | 3.40E−04 | 2.52E−09 |
| AX239 | 3.03E+04 | 9.60E−04 | 3.16E−08 |
| AX240 | 1.60E+05 | 1.66E−04 | 1.04E−09 |
| AX241 | 1.97E+05 | 1.60E−04 | 8.13E−10 |
| AX242 | 1.62E+05 | 1.93E−04 | 1.19E−09 |
| AX243 | 1.31E+05 | 1.91E−04 | 1.46E−09 |
| AX244 | 1.89E+05 | 2.03E−04 | 1.07E−09 |
| AX245 | 1.12E+05 | 3.19E−04 | 2.84E−09 |
| AX246 | 2.49E+05 | 2.01E−04 | 8.06E−10 |
| AX247 | 1.86E+05 | 2.44E−04 | 1.31E−09 |
| AX248 | 1.89E+05 | 2.07E−04 | 1.09E−09 |
| AX249 | 1.90E+05 | 2.06E−04 | 1.08E−09 |
| AX250 | 3.07E+05 | 2.40E−04 | 7.81E−10 |
| AX251 | 2.54E+05 | 2.52E−04 | 9.93E−10 |
| AX252 | 1.37E+05 | 4.67E−04 | 3.42E−09 |
| AX253 | 1.61E+05 | 6.81E−04 | 4.23E−09 |
| AX254 | 9.24E+04 | 2.95E−04 | 3.19E−09 |
| AX255 | 9.61E+04 | 3.91E−04 | 4.07E−09 |
| AX256 | 1.26E+05 | 3.65E−04 | 2.90E−09 |
| AX257 | 2.53E+05 | 1.68E−04 | 6.64E−10 |
| AX258 | 1.12E+05 | 6.30E−04 | 5.63E−09 |
| AX259 | 6.92E+04 | 6.04E−04 | 8.73E−09 |
| AX260 | 4.19E+04 | 5.20E−04 | 1.24E−08 |
| AX260 | 2.64E+04 | 5.70E−04 | 2.16E−08 |
| AX263 | 2.78E+04 | 1.70E−04 | 6.11E−09 |
| AX267 | 1.29E+05 | 4.75E−04 | 3.70E−09 |
| AX268 | 2.77E+04 | 4.17E−04 | 1.50E−08 |
| AX269 | 1.13E+05 | 3.14E−04 | 2.77E−09 |
| AX269 | 9.49E+04 | 3.20E−04 | 3.37E−09 |
| AX299 | 1.03E+05 | 2.57E−04 | 2.51E−09 |
| AX300 | 1.15E+05 | 3.12E−04 | 2.72E−09 |
| AX301 | 1.28E+05 | 6.00E−04 | 4.67E−09 |
| AX302 | 1.14E+05 | 6.68E−04 | 5.89E−09 |
| AX303 | 7.37E+04 | 8.61E−04 | 1.17E−08 |
| AX306 | 9.04E+04 | 4.47E−04 | 4.94E−09 |
| AX307 | 8.88E+04 | 2.70E−03 | 3.03E−08 |
| AX308 | 5.23E+04 | 2.59E−03 | 4.96E−08 |
| AX310 | 1.09E+05 | 7.43E−04 | 6.79E−09 |
| AX311 | 1.47E+05 | 4.98E−04 | 3.39E−09 |
| AX312 | 1.58E+05 | 1.41E−03 | 8.94E−09 |
| AX313 | 2.13E+05 | 7.35E−04 | 3.46E−09 |
| AX314 | 1.09E+05 | 1.72E−03 | 1.58E−08 |
| AX315 | 4.65E+04 | 2.31E−04 | 4.97E−09 |
| AX316 | 1.57E+05 | 5.63E−04 | 3.59E−09 |
| AX318 | 1.67E+05 | 2.71E−05 | 1.62E−10 |
| AX319 | 2.59E+05 | 4.25E−05 | 1.64E−10 |
| AX320 | 1.51E+05 | 2.62E−05 | 1.74E−10 |
| AX322 | 1.19E+05 | 1.83E−04 | 1.54E−09 |
| AX323 | 1.79E+05 | 8.36E−05 | 4.66E−10 |
| AX325 | 1.39E+05 | 1.19E−04 | 8.53E−10 |
| AX326 | 1.68E+05 | 6.52E−05 | 3.87E−10 |
| AX329 | 1.33E+05 | 2.09E−04 | 1.57E−09 |

[0490] The Fabs which showed functional efficacy in the cell-base assays were converted into IgG molecules. The affinities of those IgG molecules were also measured by Biacore assay. Briefly, anti-human IgG monoclonal antibody form Human Antibody Capture Kit provided by Biacore was immobilized on CM5 chips at level of 8000 to 10000 RU. The IgG samples at concentration of ˜0.4 μg/ml was injected onto sensor chip for 2 minutes at a flow rate of 20 μl/min, then PCSK9 proteins at 5 concentrations (3.75 to 60 nM) were injected onto IgG captured flow cell for binding kinetic analysis. After each round injection, the sensor chip surface was regenerated by 30 second injection of 3M Magnesium Chloride. The affinities of AX114, AX1213 and other variants are shown in Table 22 and Table 23.

TABLE 22
Purified IgGs against human PCSK9

| Name | ka (1/Ms) | kd (1/s) | KD (M) |
|---|---|---|---|
| AX114 | 1.51E+05 | 3.61E−03 | 2.40E−08 |
| AX132 | 2.48E+05 | 1.52E−03 | 6.16E−09 |
| AX137 | 3.33E+05 | 3.32E−03 | 9.98E−09 |
| AX210 | 2.35E+05 | 6.21E−04 | 2.64E−09 |
| AX211 | 3.61E+05 | 5.89E−04 | 1.63E−09 |
| AX212 | 1.53E+05 | 3.24E−04 | 2.12E−09 |
| AX213 | 3.53E+05 | 7.30E−04 | 2.07E−09 |

TABLE 23
Purified IgGs against rhesus PCSK9

| Name | ka (1/Ms) | kd (1/s) | KD (M) |
|---|---|---|---|
| AX240 | 1.41E+06 | 3.09E−04 | 2.20E−10 |
| AX241 | 1.56E+06 | 3.46E−04 | 2.22E−10 |
| AX242 | 1.76E+06 | 3.25E−04 | 1.85E−10 |
| AX243 | 7.71E+05 | 8.70E−04 | 1.13E−09 |
| AX245 | 8.90E+05 | 1.05E−03 | 1.18E−09 |
| AX246 | 1.48E+06 | 6.14E−04 | 4.16E−10 |
| AX248 | 1.16E+06 | 4.58E−04 | 3.96E−10 |
| AX249 | 1.22E+06 | 6.53E−04 | 5.35E−10 |
| AX250 | 2.09E+06 | 6.23E−04 | 2.98E−10 |
| AX253 | 1.62E+06 | 1.76E−03 | 1.09E−09 |
| AX267 | 1.38E+06 | 1.26E−03 | 9.13E−10 |
| AX277 | 9.99E+05 | 1.67E−03 | 1.67E−09 |
| AX369 | 9.71E+05 | 2.30E−03 | 2.37E−09 |
| AX370 | 1.01E+06 | 2.31E−03 | 2.28E−09 |
| AX402 | 1.09E+06 | 2.32E−03 | 2.12E−09 |
| AX406 | 8.86E+05 | 2.01E−03 | 2.27E−09 |
| AX408 | 7.65E+05 | 1.50E−03 | 1.96E−09 |
| AX415 | 7.50E+05 | 3.12E−03 | 4.15E−09 |
| AX417 | 1.10E+06 | 9.04E−04 | 8.22E−10 |
| AX419 | 1.25E+06 | 9.41E−04 | 7.51E−10 |
| AX426 | 6.92E+05 | 6.28E−04 | 9.08E−10 |
| AX427 | 7.45E+05 | 5.60E−04 | 7.51E−10 |
| AX428 | 6.55E+05 | 4.43E−04 | 6.76E−10 |
| AX429 | 7.25E+05 | 5.88E−04 | 8.11E−10 |
| AX430 | 9.15E+05 | 8.52E−04 | 9.31E−10 |
| AX432 | 7.39E+05 | 1.25E−03 | 1.69E−09 |
| AX436 | 4.81E+05 | 7.93E−04 | 1.65E−09 |
| AX439 | 7.40E+05 | 7.36E−04 | 9.94E−10 |
| AX441 | 7.92E+05 | 8.22E−04 | 1.04E−09 |
| AX444 | 7.08E+05 | 4.99E−04 | 7.06E−10 |

LIST OF VH SEQUENCES
>
EVQLLESGGGLVQPGGSLRLSCKASGYTFSSYGMYWVRQAPGKGLEWIGWIDPGSGGT
KYNEKFKGKATISRDNSKNTLYLQMNSLRAEDTAVYYCARERYGYYFDYWGQGTLVT
VSSAS
>
QVQLLESGGGLVQPGGSLRLSCKASGYTFSSYSIYWVRQAPGKGLEWIGWIDPGNGGT
RYNQKFQSKATISRDNSKNTLYLQMNSLRAEDTAVYYCARARVGYSLDYWGQGTLVT
VSSAS
>
QVQLLESGGGLVQPGGSLRLSCKASGYTFSRQGFTWVRQAPGKGLEWIGWIDPGNGGT
RYNEKFKGKATISRDNSKNTLYLQMNSLRAEDTAVYYCARYRVGYSLDYWGQGTLVT
VSSAS
>
QVQLLESGGGLVQPGGSLRLSCKASGYTFSSYSFSWVRQAPGKGLEWIGYIDPGSGGTK
YNQKFQGKATISRDNSKNTLYLQMNSLRAEDTAVYYCARQRVGYSLDYWGQGTLVTV
SSAS
>
QVQLLESGGGLVQPGGSLRLSCKASGYTFSRYGINWVRQAPGKGLEWIGRIDPGNGGT
RYNEKFKGKATISRDNSKNTLYLQMNSLRAEDTAVYYCARANDGYSFDYWGQGTLVT
VSSAS
>
QVQLLESGGGLVQPGGSLRLSCKASGYTFSRYGISWVRQAPGKGLEQIGWIDPGSGGTR
YNQKFKSKATISRDNSKNTLYLQMNSLRAEDTAVYYCARARVGYSFDYWGQGTLVTV
SSAS
>
QVQLLESGGGLVQPGGSLRLSCKASGYTFSSYTNYWVRQAPGKGLEWIGYIDPGSGGT
RYNQKFQGKATISRDNSKNTLYLQMNSLRAEDTAVYYCARSRVGYSFDYWGQGTLVT
VSSAS
>
QVQLLESGGGLVQPGGSLRLSCKASGYTFSRYSYYWVRQAPGKGLEWIGYIDPGSGGT
KYNQKFQSKATISRDNSKNTLYLQMNSLRAEDTAVYYCARARVGYSFDYWGQGTLVT
VSSAS
>
QVQLLESGGGLVQPGGSLRLSCKASGYTFSSYANTWVRQAPGKGLEWIGWIDPGNGGT
SYNQKFKSKATISRDNSKNTLYLQMNSLRAEDTAVYYCARYRSGYSLDYWGQGTLVT
VSSAS
>
QVQLLESGGGLVQPGGSLRLSCKASGYTFSSYGYYWVRQAPGKGLEWIGWIDPGSGGT
RYNQKFKGKATISRDNSKNTLYLQMNSLRAEDTAVYYCARERVGYSLDYWGQGTLVT
VSSAS
>
QVQLLESGGGLVQPGGSLRLSCKASGYTFSRYAINWVRQAPGKGLEWIGWIDPGSGGT
RYNEKFKGQATISRDNSKNTLYLQMNSLRAEDTAVYYCARHRVGYSLDFWGQGTLVT
VSSAS
>
QVQLLESGGGLVQPGGSLRLSCKASGYTFSRYGIYWVRQAPGKGLEWIGYIDPGSGGTR
YNEKFKGKATISRDNSKNTLYLQMNSLRAEDTAVYYCARYHYGYSFDYWGQGTLVTV
SSAS
>
QVQLLESGGGLVQPGGSLRLSCKASGYTFSRYGYYWVRQVPGKGLEWIGYIDPGNGGT
SYNEKFKGKATISRDNSKNTLYLQMNSLRAEDTAVYYCARYHDGYSFDYWGQGTLVT
VSSAS
>
QVQLLESGGGLVQPGGSLRLSCKASGYTFSRYAYNWVRQAPGKGLEWIGWIDPGSGGT
RYNQKFKGKATISRDNSKNTLYLQMNSLRAEDTAVYYCARERFAYYLDYWGQGTLVT
VSSAS
>
QVQLLESGGGLVQPGGSLRLSCKASGYTFSRYGFSWVRQAPGKGLEWIGRIDPGSGGTR
YNQQFQGKATISRDNSKNTLYLQMNSLRAEDTAVYYCARSRDGYYFDYWGQGTLVTV
SSAS
>
QVQLLESGGGLVQPGGSLRLSCKASGYTFSRYAFNWVRQAPGKGLEWIGYIDPGSGGT
RYNEKFQGKATISRDNSKNTLYLQMNSLRAEDTAVYYCARARDGYSFDYWGQGTLVT
VSSAS
>QVQLLESGGGLVQPGGSLRLSCKASGYTFSSYGIYWVRQAPGKGLEWIGWIDPGSGGT
RYNEKFQSKATISRDNSKNTLYLQMNSLRAEDTAVYYCARERAGYYLDYWGQGTLVT
VSSAS
>
QVQLLESGGGLVQPGGSLRLSCKASGYTFSRYTITWVRQAPGKGLEWIGYIDPGSGGTK
YNEKFQGKATISRDNSKNTLYLQMNSLRAEDTAVYYCARHRVGYYFDYWGQGTLVTV
SSAS
>
QVQLLESGGGLVQPGGSLRLSCKASGYTFSRYSFIWVRQAPGKGLEWIGYIDPGSGGTK
YNQKFKGKATISRDNSKNTLYLQMNSLRTEDTAVYYCARYRSGYSLDYWGQGTLVTV
SSAS
>
QVQLLESGGGLVQPGGSLRLSCKASGYTFSRYTFYWVRQAPGKGLEWIGYIDPGSGGT
RYNQKFKGKATISRDNSKNTLYLQMNSLRAEDTAVYYCARARVGYSFDYWGQGTLVT
VSSAS
>
QVQLLESGGGLVQPGGSLRLSCKASGQTFSSYGFNWVRQAPGKGLEWIGWIDPGSGGT
RYNQKFKSKATISRDNSKNTLYLQMNSLRAEDTAVYYCARANVGYSFDYWGQGTLVT
VSSAS
>
QVQLLESGGGLVQPGGSLRLSCKASGYTFSRYGYYWVRQAPGKGLEWIGRIDPGSGGT
SYNEKFQSKATISRDNSKNTLYLQMNSLRAEDTAVYYCARARVG?SFDYWGQGTLVTV
SSAS
>
QVQLLESGGGLVQPGGSLRLSCKASGYTFSRYGIYWVRQAPGKGLEWIGRIDPGNGGT
RYNQKFQSKATISRDNSKNTLYLQMNSLRAEDTAVYYCARSRVGYSFDYWGQGTLVT
VSSAS
>
QVQLLESGGGLVQPGGSLRLSCKASGYTFSRYANYWVRQAPGKGLEWIGYIDPGSGGT
KYNEKFKGKATISRDNSKNTLYLQMNSLRAEDTAVYYCARSHVGYYFDYWGQGTLVT
VSSAS
>
QVQLLESGGGLVQPGGSLRLSCKASGYTFSRYSNSWVRQAPGKGLEWIGWIDPGNGGT
RYNQKFQSKATISRDNSKNTLYLQMNSLRAEDTAVYYCARARVGYSFDYWGQGTLVT
VSSAS
>
QVQLLESGGGLVQPGGSLRLSCKASGYTFSSYSITWVRQAPGKGLEWIGWIDPGSGGTR
YNEKFKSKATISRDNSKNTLYLQMNSLRAEDTAVYYCARHRVGYSLDYWGQGTLVTV
SSAS
>
QVQLLESGGGLVQPGGSLRLSCKASGYTFSRYGFSWVRQAPGKGLEWIGWIDPGNGGT
RYNQQFKGKATISRDNSKNTLYLQMNSLRAEDTAVYYCARSRVGYSLDYWGQGTLVT
VSSAS
>
QVQLLESGGGLVQPGGSLRLSCKASGYTFSSYTYTWVRQAPGKGLEWIGWIDPGSGGT
RYNEKFEGKATISRDNSKNTLYLQMNSLRAEDTAVYYCARSRVGYSLDYWGQGTLVT
VSSAS
>
QVQLLESGGGLVQPGGSLRLSCKASGYTFSSYSYYWVRQAPGKGLEWIGRIDPGSGGT
RYNQKFQGKATISRDNSKNTLYLQMNSLRAEDTAVYYCARYRDGYSFDYWGQGTLVT
VSSAS
>
QVQLLESGGGLVQPGGSLRLSCKASGYTFSSYGYSWVRQAPGKGLEWIGRIDPGSGGT
KYNEKFKGKATISRDNSKNTLYLQMNSLRAEDTAVYYCARDRVGYSLDYWGQGTLVT
VSSAS
>
QVQLLESGGGLVQPGGSLRLSCKASGYTFSRYTFSWVRQAPGKGLEWIGYIDPGNGGT
RYNEQFKGKATISRDNSKNTLYLQMNSLRAEDTAVYYCARQRVGYNLDYWGQGTLVT
VSSAS
>
QVQLLESGGGLVQPGGSLRLSCKASGYTFSSYGFSWVRQAPGKGLEWIGWIDPGNGGT
RYNEQFQGKATISRDNSKNTLYLQMNSLRAEDTAVYYCARQRVGYSLDYWGEGTLVT
VSSAS
>
QVQLLESGGGLVQPGGSLRLSCKASGYTFSRYSNSWVRQAPGKGLEWIGWIDPGNGGT
RYNEQFQGKATISRDNSKNTLYLQMNSLRAEDTAVYYCARQRVGYSLDYWGQGTLVT
VSSAS
>
QVQLLESGGGLVQPGGSLRLSCKASGYTFSSYGQSWVRQAPGKGLEWIGRIDPGSGGT
RYNEKFQGKATISRDNSKNTLYLQMNSLRAEDTAVYYCARSRDGYSLDYWGQGTLVT
VSSAS
>
QVQLLESGGGLVQPGGSLRLSCKASGYTFSSYAISWVRQAPGKGLEWIGRIDPGSGGTR
YNEKFQSKATISRDNSKNTLYLQMNSLRAEDTAVYYCARSRDGYSLDYWGQGTLVTV
SSAS
>
QVQLLESGGGLVQPGGSLRLSCKASGYTFSRYSYYWVRQAPGKGLEWIGYIDPGSGGT
KYNQKFKGKATISRDNSKNTLYLQMNSLRAEDTAVYYCARYRDGYSFDYWGQGTLVT
VSSAS
>
QVQLLESGGGLVQPGGSLRLSCKASGYTFSSYTYNWVRQAPGKGLEWIGYIDPGNGGT
NYNQKFQSKATISRDNSKNTLYLQMNSLRAEDTAVYYCARSRVGYSLDYWGQGTLVT
VSSAS
>
QVQLLESGGGLVQPGGSLRLSCKASGYTFSSYTISWVRQAPGKGLEWIGYIDPGNGGTR
YNQQFQGKATISRDNSKNTLYLQMNSLRVEDTAVYYCARSRVGYSFDYWGQGTLVTV
SSAS
>
QVQLLESGGGLLQPGGSLRLSCKASGYTFSRYTFNWVRQAPGKGLEWIGWIDPGSGGT
RYNQKFQSKATISRDNSKNTLYLQMNSLRAEDTAVYYCARARVGYSFDYWGQGTLVT
VSSAS
>
QVQLLESGGGLVQPGGSLRLSCKGQRLPPRYGYYWVRQAPGKGLEWIGYIDPGNGGTR
YNEKFQSKATISRDNSKNTLYLQMNSLRAEDTAVYYCARYRSGYYLDYWGQGTLVTV
SSAS
>
QVQLLESGGGLVQPGGSLRLSCKASGYTYSRYTFSWVRQAPGKGLEWIGYIDPGSGGT
KYNQKFKGKATISRDNSKNTLYLQMNSLRAEDTAVYYCARARVGYSFDYWGQGTLVT
VSSAS
>
QVQLLESGGGLVQPGGSLRLSCKASGYTFSSYGYYWVRQAPGKGLEWIGYIDPGSGGT
RYNQKFKSKATISRDNSKNTLYLQMNSLRAEDTAVYYCARYRVGYSFDYWGQGTLVT
VSSAS
>
QVQLLESGGGLVQPGGSLRLSCKASGYTFSRYGFSWVRQAPGKGLEWIGRIDPGSGGTR
YNEKFQSKATISWDNSKNTLYLQMNSLRAEDTAVYYCARSRDGYSFDYWGQGTLVTV
SSAS
>
QVQLLESGGGLVQPGGSLRLSCKASDYTFSSYGNNWVRQAPGKGLEWIGRIDPGNGGT
RYNEKFQGKATISRDNSKNTLYLQMNSLRAEDTAVYYCARARDGYSLDYWGQGTLVT
VSSAS
>
QVQLLESGGGLVQPGGSLRLSCKASGYTFSSYGISWVRQAPGKGLEWIGWIDPGNGGT
KYNQKFQSKATISRDNSKNTLYLQMNSLRAEDTAVYYCARSRVGYSLDYWGQGTLVT
VSSAS
>
QVQLLESGGGLVQPGGSLRLSCKASGYTFSSYTINWVRQAPGKGLEWIGWIDPGSGGTR
YNEKFQGKATISRDNSKNTLYLQMNSLRAEDTAVYYCARHRVGYSFDYWGQGTLVTV
SSAS
>
QVQLLESGGGLVQPGGSLRLSCKASGYTFSRYGISWVRQAPGKGLEWIGRIDPGSGGTR
YNEKFQSKATISRDNSKNTLYLQMNSLRAQDTAVYYCARANDGYSFDYWGQGTLVTV
SSAS
>
QVQLLESGGGLVQPGGSLRLSCKASGYTFSRYGINWVRQAPGKGLEWIGRIDPGNGGT
RYNEKFKGKATISRDNSKNTLYLQMNSLRAEDTAVYYCARADVGYSFDYWGQGTLVT
VSSAS
>
EVQLLESGGGLVQPGGSLRLSCKASGYTFSSYGMYWVRQAPGKGLEWIGWIDPGSGGT
KYNEKFKGKATISRDNSKNTLYLQMNSLRAEDTAVYYCARGFVYYSFDYWGQGTLVT
VSSAS
>
EVQLLESGGGLVQPGGSLRLSCKASGYTFSSYGMYWVRQAPGKGLEWIGWIDPGSGGT
KYNEKFKGKATISRDNSKNTLYLQMNSLRAEDTAVYYCARGFIYYSFDYWGQGTLVT
VSSAS
>
EVQLLESGGGLVQPGGSLRLSCKASGYTFSSYGMYWVRQAPGKGLEWIGWIDPGSGGT
KYNEKFKGKATISRDNSKNTLYLQMNSLRAEDTAVYYCARGFLYYSFDYWGQGTLVT
VSSAS
>
EVQLLESGGGLVQPGGSLRLSCKASGYTFSSYGMYWVRQAPGKGLEWIGWIDPGSGGT
KYNEKFKGKATISRDNSKNTLYLQMNSLRAEDTAVYYCARGRIYYSFDYWGQGTLVT
VSSAS
>
EVQLLESGGGLVQPGGSLRLSCKASGYTFSSYGMYWVRQAPGKGLEWIGWIDPGSGGT
KYNEKFKGKATISRDNSKNTLYLQMNSLRAEDTAVYYCARGRFYYSFDYWGQGTLVT
VSSAS
>
EVQLLESGGGLVQPGGSLRLSCKASGYTFSSYGMYWVRQAPGKGLEWIGWIDPGSGGT
KYNEKFKGKATISRDNSKNTLYLQMNSLRAEDTAVYYCARGRLYYSLDYWGQGTLVT
VSSAS
>
EVQLLESGGGLVQPGGSLRLSCKASGYTFSSYGMYWVRQAPGKGLEWIGWIDPGSGGT
KYNEKFKGKATISRDNSKNTLYLQMNSLRAEDTAVYYCARGFIYYDFDYWGQGTLVT
VSSAS
>
EVQLLESGGGLVQPGGSLRLSCKASGYTFSSYGMYWVRQAPGKGLEWIGWIDPGSGGT
KYNEKFKGKATISRDNSKNTLYLQMNSLRAEDTAVYYCARGKIYYSFDYWGQGTLVT
VSSAS
>
EVQLLESGGGLVQPGGSLRLSCKASGYTFSSYGMYWVRQAPGKGLEWIGWIDPGSGGT
KYNEKFKGKATISRDNSKNTLYLQMNSLRAEDTAVYYCARGYLYYSFDYWGQGTLVT
VSSAS
>
EVQLLESGGGLVQPGGSLRLSCKASGYTFSSYGMYWVRQAPGKGLEWIGWIDPGSGGT
KYNEKFKGKATISRDNSKNTLYLQMNSLRAEDTAVYYCARGFIYYSLDYWGQGTLVT
VSSAS
>
EVQLLESGGGLVQPGGSLRLSCKASGYTFSSYGMYWVRQAPGKGLEWIGWIDPGSGGT
KYNEKFKGKATISRDNSKNTLYLQMNSLRAEDTAVYYCARGNLYYSLDYWGQGTLVT
VSSAS
>
EVQLLESGGGLVQPGGSLRLSCKASGYTFSSYGMYWVRQAPGKGLEWIGWIDPGSGGT
KYNEKFKGKATISRDNSKNTLYLQMNSLRAEDTAVYYCSRGKVGYSLDYWGQGTLVT
VSSAS
>
EVQLLESGGGLVQPGGSLRLSCKASGYTFSSYGMYWVRQAPGKGLEWIGWIDPGSGGT
KYNEKFKGKATISRDNSKNTLYLQMNSLRAEDTAVYYCARGSIGYNLDYWGQGTLVT
VSSAS
>
EVQLLESGGGLVQPGGSLRLSCKASGYTFSSYGMYWVRQAPGKGLEWIGWIDPGSGGT
KYNEKFKGKATISRDNSKNTLYLQMNSLRAEDTAVYYCARGRDGYSLDYWGQGTLVT
VSSAS
>
EVQLLESGGGLVQPGGSLRLSCKASGFTFSAYGMYWVRQAPGKGLEWIGRIDPSNGGT
KYNQKFKGKATISRDNSKNTLYLQMNSLRAEDAAVYYCARERYGYYFDYWGQGTLV
TVSSAS
>
EVQLLESGGGLVQPGGSLRLSCKASGFTFSDYGMYWVRQAPGKGLEWIGRINPNSGGT
KYNEKFKGKATISRDNSKNTLYLQMNSLRAEDTAVYYCARERYGYYFDYWGQGTLVT
VSSAS
>
EVQLLESGGGLVQPGGSLRLSCKASGFTFSSYQMSWVRQAPGKGLEWIGRIDPGSGGTK
YNQKFKGKATISRDNSKNTLYLQMNSLRAEDTAVYYCARERYGYYFDYWGQGTLVTV
SSAS
>
EVQLLESGGGLVQPGGSLRLSCKASGFTFSYYYMYWVRQAPGKGLEWVGRISPSGGST
YYADSVKGRFTISRDNSKNTLYLQMNSLRAEDTAVYYCARERYGYYFDYWGQGTLVT
VSSAS
>
EVQLLESGGGLVQPGGSLRLSCKASGFTFTAYGMYWVRQAPGKGLEWIGRIDPGSGGT
KYNQKFKGKATISRDNSKNTLYLQMNSLRAEDTAVYYCARERYGYYFDYWGQGTLVT
VSSAS
>
EVQLLESGGGLVQPGGSLRLSCKASGFTFTSYQMSWVRQAPGKGLEWIGRINPGSGGT
KYDEKFKGRATISRDNSKNTLYLQMNSLRAEDTAVYYCARERYGYYFDYWGQGTLVT
VSSAS
>
EVQLLESGGGLVQPGGSLRLSCKASGFTFTSYWMSWVRQAPGKGLEWIGRINPGSGGT
KYDEKFKGRATISRDNSKNTLYLQMNSLRAEDTAVYYCARERYGYYFDYWGQGTLVT
VSSAS
>
EVQLLESGGGLVQPGGSLRLSCKASGLTFTDYGMYWVRQAPGKGLEWIGWINPDSGST
KYAEKFKGRATISRDNSKNTLYLQMNSLRAEDTAVYYCARERYGYYFDYWGQGTLVT
VSSAS
>
EVQLLESGGGLVQPGGSLRLSCKASGYTFSYYGMYWVRQAPGKGLEWIGRIDPGSGGT
KYNEKFKGKATISRDNSKNTLYLQMNSLRAEDTAVYYCARERYGYYFDYWGQGTLVT
VSSAS
>
EVQLLESGGGLVQPGGSLRLSCKASGYTFTDYGMYWVRQAPGKGLEWIGWIDPGSGG
TKYNEKFKGKATISRDNSKNTLYLQMNSLRAEDTAVYYCARERYGYYFDYWGQGTLV
TVSSAS
>
EVQLLESGGGLVQPGGSLRLSCKASGYTFTNYGMNWVRQAPGKGLEWIGRIDPSSGGT
KYNQKFKGKATISRDNSKNTLYLQMNSLRAEDTAVYYCARERYGYYFDYWGQGTLVT
VSSAS
>
EVQLLESGGGLVQPGGSLRLSCKASGYTFTSYGMYWVRQAPGKGLEWIGRIDPSSGGT
KYNQKFKGKATISRDNSKNTLYLQMNSLRAEDTAVYYCARERYGYYFDYWGQGTLVT
VSSAS
>
EVQLLESGGGLVQPGGSLRLSCKASGYTFTSYWMSWVRQAPGKGLEWVGRISPGGGTT
YYADSVKGRFTISRDNSKNTLYLQMNSLRAEDTAVYYCARERYGYYFDYWGQGTLVT
VSSAS
>
EVQLLESGGGLVQPGGSLRLSCQASGYTFSSYGMYWVRQAPGKGLEWIGRINPGSGGT
NYDEKFKGRATISRDNSKNTLYLQMNSLRAEDTAVYYCARERYGYYFDYWGQGTLVT
VSSAS
>
EVQLLESGGGLVQPGGSLRLSCEASGFTFSSYGMYWVRQAPGKGLEWIGRINPKQRWH
KYNQKFKGKVTISRDNSKNTLYLQMNSLRAEDTAVYYCARERYGYYFDYWGQGTLVT
VSSAS
>
EVQLLESGGGLVQPGGSLRLSCEASGFSFSNYGMYWVRQAPGKOLEWIGLDRPRQRW
HQLNEKFQGRATISRDNSKNTLYLQMNSLRAEDTAVYYCARERYGYYFDYWGQGTLV
TVSSAS
>
EVQLLESGGGLVQPGGSLRLSCAASGYSFSAYYIHWVRQAPGKGLESIGRIDPGSGGTK
YNEKFQGRATISRDNSKNTLYLQMNSLRAEDIAVYYCARERYGYYFDYWGQGTLVTV
SSAS
>
EVQLLESGGGLVQPGGSLRLSCKASGFSFSSYGIYWVRQAPGKGLEWIGLDRPKQRVGT
KYNQKFQGRVTISRDNSKNTLYLQMNSLRAEDTAVYYCARERYGYYFDYWGQGTLVT
VSSAS
>
EVQLLESGGGLVQPGDSLRLSCAASGYSFSTFGIYWVRQAPGKGLEWIGLDRPRQRWP
KYNEKFKGRATISRDNSKNTLYLQMNSLRAEDTAVYYCARERYGYYFDYWGQGTLVT
VSSAS
>
EVQLLESGGGLVQPGGSLRLSCEASGFTFSDYGIHWVRQAPGKGLEWIGLDRPKQRWH
QYNEKFQGRATISRDNSKNTLYLQMNSLRAEDTAVYYCARERYGYYFDYWGQGTLVT
VSSAS
>
EVQLLESGGGLVQPGGSLRLSCAASGYTFSDFGIYWVRQAPGKGLEWIGSDRPRQRVAP
KYNQKFKGRATISRDNSKNTLYLQMNSLRAEDTAVYYCARERYGYYFDYWGQGTLVT
VSSAS
>
EVQLLESGGGLVQPGGSLRLSCQASGYSFTTYGMYWVRQAPGKGLEWIGRIDPSSGGT
KYNQKFQGRVTISRDNSKNTLYLQMNSLRAEDTAVYYCARERYGYYFDYWGQGTLVT
VSSAS
>
EVQLLESGGGLVQPGGSLRLSCAASGFTFTNYGMYWVRQAPGKGLEWIGLDRPKQRGT
KYNQKFQGRATISRDNSKNTLYLQMNSLRAEDTAVYYCARERYGYYFDYWGQGTLVT
VSSAS
>
EVQLLESGGGLVQPGGSLRLSCKASGYTFSYFGIYWVRQAPGKGLEWIGSDRPRQRWH
QVQRKFKGRATISRDNSKNTLYLQMNSLRAEDTAVYYCARERYGYYFDYWGQGTLVT
VSSAS
>
EVQLLESGGGLVQPGGSLRLSCTASGFTFSNYGMYWVRQAPGKGLEWIGRIDPNSGGT
KYNEKFQGRATISRDNSKNTLYLQMNSLRAEDTAVYYCARERYGYYFDYWGQGTLVT
VSSAS
>
EVQLLESGGGLVQPGGSLRLSCTASGYSFTAFGMYWVRQAPGKGLEWIGRINPSSGGT
NYNEQFQGRATISRDNSKNTLYLQMNSLRAEDTAVYYCARERYGYYFDYWGQGTLVT
VSSAS
>
EVQLLESGGGLVQPGGSLRLSCKASGFTFSSYGMYWVRQAPGKGLEWIGSDRPRQRW
HQVQPKVQGRATISRDNSKNTLYLQMNSLRAEDTAVYYCARERYGYYFDYWGQGTLV
TVSSAS
>
EVQLLESGGGLVQPGGSLRLSCKASGYSFSAYGMYWVRQAPGKGLEWIGRIDPNSGGT
KQNEKFQGRATISRDNSKNTLYLQMNSLRAEDTAVYYCARERYGYYFDYWGQGTLVT
VSSAS
>
EVQLLESGGGLVQPGGSLRLSCEASGYTFTSFQMHWVRQAPGKGLESIGRIDPGSGGTK
YNQKFQGRATISRDNSKNTLYLQMNSLRAEDTAVYYCARERYGYYFDYWGQGTLVTV
SSAS
>
EVQLLESGGGLVQPGGSLRLSCAASGYTFSSFSMYWVRQAPGKGLEWIGLDRPRQRWH
QVNEKFQGRATISRDNSKNTLYLQMNSLRAEDTAVYYCARERYGYYFDYWGQGTLVT
VSSAS
>
EVQLLESGGGLVQPGGSLRLSCQASGYTFTNYGMYWVRQAPGKGLEWIGRIDPGNGGT
KYNEKFKGKVTISRDNSKNTLYLQMNSLRAEDTAVYYCARERYGYYFDYWGQGTLVT
VSSAS
>
EVQLLESGGGLVQPGGSLRLSCQASGYTFTAFGMYWVRQAPGKGLEWIGRIDPGSGGT
KYNEKFQGKVTISRDNSKNTLYLQMNSLRAEDTAVYYCARERYGYYFDYWGQGTLVT
VSSAS
>
EVQLLESGGGLVQPGGSLRLSCKASGFSFTSYGMYWVRQAPGKGLEWIGQDRPKYGGT
KYNEKFKGRVTISRDNSKNTLYLQMNSLRAEDTAVYYCARERYGYYFDYWGQGTLVT
VSSAS
>
EVQLLESGGGLVQPGGSLRLSCQASGFTFSTYGIYWVRQAPGKGLEWIGRINPSNGGTK
YNEKFKGRATISRDNSKNTLYLQMNSLRAEDTAVYYCARERYGYYFDYWGQGTLVTV
SSAS
>
EVQLLESGGGLVQPGGSLRLSCKASGFSFSSYGMYWVRQAPGKGLEWIGSDRPRQRWG
TKYNEKFQGRVTISRDNSKNTLYLQMNSLRAEDTAVYYCARERYGYYFDYWGQGTLV
TVSSAS
>
EVQLLESGGGLVQPGGSLRLSCEASGYSFSNFGMYWVRQAPGKGLEWIGWINPSNGGT
KYNEKFKGRATISRDNSKNTLYLQMNSLRAEDTAVYYCARERYGYYFDYWGQGTLVT
VSSAS
>
EVQLLESGGGLVQPGGSLRLSCTASDFSFSTFSMYWVRQAPGKGLEWIGSDQPRQGGT
KYNEKFKGRATISRDNSKNTLYLQMNSLRAEDTAVYYCARERYGYYFDYWGQGTLVT
VSSAS
>
EVQLLESGGGLVQPGGSLRLSCAASGYTFSDFGIYWVRQAPGKGLEWIGSDRPRQGGT
KYNEKFKDRVTISRDNSKNTLYLQMNSLRAEDTAVYYCARERYGYYFDYWGQGTLVT
VSSAS
>
EVQLLESGGGLVQPGGSLRLSCAASGYSFTSFGIYWVRQAPGKGLEWIGSDRPKQRGTK
YNEKFKGKVTISRDNSKNTLYLQMNSLRAEDTAVYYCARERYGYYFDYWGQGTLVTV
SSAS
>
EVQLLESGGGLVQPGGSLRLSCQASGFSFSDYYMSWVRQAPGKGLESIGRINPGSGGTK
YNEKFQGRATISRDNSKNTLYLQMNSLRAEDTAVYYCARERYGYYFDYWGQGTLVTV
SSAS
>
EVQLLESGGGLVQPGGSLRLSCAASGYSFSDYGIYWVRQAPGKGLEWIGSDRPKQRWH
QVNEKFQGKVTISRDNSKNTLYLQMNSLRAEDTAVYYCARERYGYYFDYWGQGTLVT
VSSAS
>
EVQLLESGGGLVQPGGSLRLSCKASGYSFSTYYMYWVRQAPGKGLEWIGRIDPDSGGT
KYNEKFQGRATISRDNSKNTLYLQMNSLRAEDTAVYYCARERYGYYFDYWGQGTLVT
VSSAS
>
EVQLLESGGGLVQPGGSLRLSCEASGYTFSAFQIYWVRQAPGKGLEWIGRIDPGNGGTK
YNEKFKGKATISRDNSKNTLYLQMNSLRAEDTAVYYCARERYGYYFDYWGQGTLVTV
SSAS
>
EVQLLESGGGLVQPGGSLRLSCQASGFSFSNFYMYWVRQAPGKGLEWIGRIDPGSGGT
KYNEKFQGRATISRDNSKNTLYLQMNSLRAEDTAVYYCARERYGYYFDYWGQGTLVT
VSSAS
>
EVQLLESGGGLVQPGGSLRLSCKASGFTFSAFGIYWVRQAPGKGLEWIGRINPDNGGTK
YNEKFQGRVTISRDNSKNTLYLQMNSLRAEDTAVYYCARERYGYYFDYWGQGTLVTV
SSAS
>
EVQLLESGGGLVQPGGSLRLSCKASGYTFSTYGMYWVRQAPGKGLEWIGRDQPRQGG
TNYNEKFQGRATISRDNSKNTLYLQMNSLRAEDTAVYYCARERYGYYFDYWGQGTLV
TVSSAS
>
EVQLLESGGGLVQPGGSLRLSCAASGYSFSTYGIYWVRQAPGKGLEWIGRINPNNGGTK
YNEKFQGKATISRDNSKNTLYLQMNSLRAEDTAVYYCARERYGYYFDYWGQGTLVTV
SSAS
>
EVQLLESGGGLVQPGGSLRLSCTASGFSFSAYGMYWVRQAPGKGLEWIGSDRPRQGGT
KYNEKFKGRVTISRDNSKNTLYLQMNSLRAEDTAVYYCARERYGYYFDYWGQGTLVT
VSSAS
>
EVQLLESGGGLVQPGGSLRLSCAASGFSFSNYYMYWVRQAPGKGLEWIGRIDPGSGGT
KYNEKFQGRATISRDNSKNTLYLQMNSLRAEDTAVYYCARERYGYYFDYWGQGTLVT
VSSAS
>
EVQLLESGGGLVQPGGSLRLSCEASGYTFTSYGMYWMRQAPGKGLEWIGRIDPGSGGT
KYNEKFQGRVTISRDNSKNTLYLQMNSLRAEDTAVYYCARERYGYYFDYWGQGTLVT
VSSAS
>
EVQLLESGGGLVQPGGSLRLSCAASGFTFTNYGMYWVRQAPGKGLEWIGSDRPKQRW
APKYNEKFKGRATISRDNSKNTLYLQMNSLRAEDTAVYYCARERYGYYFDYWGQGTL
VTVSSAS
>
EVQLLESGGGLVQPGGSLRLSCKASGYTFSDFAMYWVRQAPGKGLEWIGSDQPRQRW
HQVQPKVQGRVTISRDNSKNTLYLQMNSLRAEDTAVYYCARERYGYYFDYWGQGTLV
TVSSAS
>
EVQLLESGGGLVQPGGSLRLSCKASGYSFTNFGMYWVRQAPGKGLEWIGRINPGNGGT
KQNEKFKGRATISRDNSKNTLYLQMNSLRAEDTAVYYCARERYGYYFDYWGQGTLVT
VSSAS
>
EVQLLESGGGLVQPGGSLRLSCAASGYSFSYYGMYWVRQAPGKGLEWIGRINPSSGGT
KYNEKFKGRATISRDNSKNTLYLQMNSLRAEDTAVYYCARERYGYYFDYWGQGTLVT
VSSAS
>
EVQLLESGGGLVQPGGSLRLSCEASGYSFSAFGIYWVRQAPGKGLEWIGRINPNSGGTK
YNEKFKGRVTISRDNSKNTLYLQMNSLRAEDTAVYYCARERYGYYFDYWGQGTLVTV
SSAS
>
EVQLLESGGGLVQPGGSLRLSCKTSGYTFSAFQIYWVRQAPGKGLEWIGRIDPGSGGTK
YNQKFKGRTTISRDNSKNTLYLQMNSLRAEDTAVYYCARERYGYYFDYWGQGTLVTV
SSAS
>
EVQLLESGGGLVQPGGSLRLSCKASGYTFSSYGMYWVRQAPGKGLEWIGWIDPGSGGT
KYQDKFKGKATISRDNSKNTLYLQMNSLRAEDTAVYYCAREKYGYYFDYWGQGTLVT
VSSAS
>
EVQLLESGGGLVQPGGSLRLSCKASGYTFSSYGMYWVRQAPGKGLEWIGWIDPGSGGT
KYQEKFKGKVTISRDNSKNTLYLQMNSLRAEDTAVYYCAREKYGYYFDYWGQGTLVT
VSSAS
>
EVQLLESGGGLVQPGGSLRLSCKASGYTFSSYGMYWVRQAPGKGLEWIGWIDPGSGGT
KYQEKFKGKATISRDNSKNTLYLQMNSLRAEDTAVYYCARYKSGWYFDYWGQGTLV
TVSSAS
>
EVQLLESGGGLVQPGGSLRLSCKASGYTFSSYGMYWVRQAPGKGLEWIGWIDPGSGGT
KYQEKFKGKATISRDNSKNTLYLQMNSLRAEDTALYYCAREKYGYYFDYWGQGMLV
TVSSAS
>
EVQLLESGGGLVQPGGSLRLSCKASGYTFSSYGMYWVRQAPGKGLEWIGWIDPGSGGT
NYQEKFKGKATISRDNSKNTLYLQMNSLRAEDTAVYYCARYRSGYYFDYWGQGTLVT
VSSAS
>
EVQLLESGGGLVQPGGSLRLSCKASGYTFSSYGMYWVRQAPGKGLEWIGWIDPGSGGT
KYQEKFKGKATISRDNSKNTLYLQMNSLRAEDTAVYYCARYRSGYYFDYWGQGTLVT
VSSAS
>
EVQLLESGGGLVQPGGSLRLSCKASGYTFSSYGMYWVRQAPGKGLEWIGWIDPGSGGT
NYQQKFKGKATISRDNSKNTLYLQMNSLRAEDTAVYYCARYKSGYYFDYWGQGTLVT
VSSAS
>
EVQLLESGGGLVQPGGSLRLSCKASGYTFSSYGMYWVRQAPGKGLEWIGWIDPGSGGT
KYADKFKGKATISRDNSKNTLYLQMNSLRAEDTAVYYCARYRSGYYFDYWGQGTLVT
VSSAS
>
EVQLLESGGGLVQPGGSLRLSCKASGYTFSSYGMYWVRQAPGKGLEWIGWIDPGSGGT
KYEEKFKGKATISRDNSKNTLYLQMNSLRAEDTAVYYCARERYGYYFDYWGQGTLVT
VSSAS
>
EVQLLESGGGLVQPGGSLRLSCKASGYTFSSYGMYWVRQAPGKGLEWIGWIDPGSGGT
KYQDKFKGKATISRDNSKNTLYLQMNSLRAEDTAVYYCAREKSGYYFDYWGQGTLVT
VSSAS
>
EVQLLESGGGLVQPGGSLRLSCKASGYTFSSYGMYWVRQAPGKGLEWIGWIDPGSGGT
KYQEKFKGKATISRDNSKNTLYLQMNSLRAEDTAVYYCAREKYGYYFDYWGQGTLVT
VSSAS
>
EVQLLESGGGLVQPGGSLRLSCKASGYTFSSYGMYWVRQAPGKGLEWIGWIDPGSGGT
KYNDKFKGKATISRDNSKNTLYLQMNSLRAEDTAVYYCARYRSGYYFDYWGQGTLVT
VSSAS
>
EVQLLESGGGLVQPGGSVRLSCKASGYTFSSYGMYWVRQAPGKGLEWIGWIDPGSGGT
KYYEKFKGKATISRDNSKNTLYLQMNSLRAEDTAVYYCARYKSGYYFDYWGQGTLVT
VSSAS
>
EVQLLESGGGLVQPGGSLRLSCKASGYTFSSYGMYWVRQAPGKGLEWIGWIDPGSGGT
KYEEKFKGKATISRDNSKNTLYLQMNSLRAEDTAVYYCARYKSGYYFDYWGQGTLVT
VSSAS
>
EVQLLESGGGLVQPGGSLRLSCKASGYTFSSYGMYWMRQAPGKGLEWIGWIDPGSGG
TKYEDKFEGKATISRDNSKNTLYLQMNSLRAEDTAVYYCARERSGYYFDYWGQGTLV
TVSSAS
>
EVQLLESGGGLVQPGGSLRLSCKASGYTFSSYGMYWVRQAPGKGLEWIGWIDPGSGGT
NYTQKFKGKATISRDNSKNTLYLQMNSLRAEDTAVYYCARYRSGYYFDYWGQGTLVT
VSSAS
>
EVQLLESGGGLVQPGGSLRLSCKASGYTFSSYGMYWVRQAPGKGLEWIGWIDPGSGGT
KYSHKFKGKATISRDNSKNTLYLQMNSLRAEDTAVYYCARERYGYYFDYWGQGTLVT
VSSAS
LIST OF VK SEQUENCES
>
EIVLTQSPATLSLSPGERATITCRASQYVGTYLNWYQQKPGQAPRLLIYDASNRATGIPA
RFSGSGSGTDFTLTISSLEPEDFAVYYCQVWDSSPPVAFGGGTKVEIK
>
EIVLTQSPATLSLSPGERATITCRASQYVGSYLNWYQQKPGQAPRLLIYDASNRATGIPA
RFSGSGSGTDFTLTISSLEPEDFAVYYCQVWDSSPPVVFGGGTKVEIK
>
EIVLTQSPATLSLSPGERATITCRASQYVGTYLNWYQQKPGQAPRLLIYDASNRATGIPA
RFSGSGSGTDFTLTISSLEPEDFAVYYCQVWDSSPPVVFGGGTKVEIK
>
EIVLTQSPATLSLSPGERATITCRASQYVGSYLNWYQQKPGQAPRLLIYDASNRATGIPA
RFSGSGSGTDFTLTISSLEPEDFAVYYCQVWDSSPPVAFGGGTKVEIK
>
EIVLTQSPATLSLSPGERATITCRASQYVGSYLNWYQQKPGQAPRLLIYDASNRATGIPA
RFSGSGSGTDFTLTISSLEPEDFAVYYCQVWDSSPPLVFGGGTKVEIK
>
EIVLTQSPATLSLSPGERATITCRASQYVGSYLNWYQQKPGQAPRLLIYDASNRATGIPA
RFSGSGSGTDFILTISSLEPEDFAVYYCQVWDSSPPLAFGGGTKVEIK
>
EIVLTQSPATLSLSPGERATITCRASQYIGSYLNWYQQKPGQAPRLLIYDASNRATGIPAR
FSGSGSGTDFTLTISSLEPEDFAVYYCQAWDSSPPVVFGGGTKVEIK
>
EIVLTQSPATLSLSPGERATITCRASQYVGSYLNWYQQKPGQAPRLLIYDASNRATGIPA
RFSGSGSGTDFTLTISSLEPEDFAVYYCQVWDSSPPVMFGGGTKVEIK
>
DIQMTQSPSSLSASVGDRVTITCRASQAISNYLTWYQQKPGKAPKLLIYAASSLQSGVPS
RFSGSGSGTDFTLTISSLQPEDFATYYCQGWDSSPTFGGGTKVEIK
>
EIVLTQSPATLSLSPGERATITCRASQYVGTYLNWYQQKPGQAPRLLIYDASNRATGIPA
RFSGSGSGTDFTLTISSLEPEDFAVYYCQVWDSSPPLVFGGGTKVEIK
>
EIVLTQSPATLSLSPGERATITCRASQYVGSYLTWYQQKPGQAPRLLIYDASNRATGIPA
RFSGSGSGTDFTLTISSLEPEDFAVYYCQVWDSSPPVVFGGGTKVEIK
>
EIVLTQSPATLSLSPGERATITCRASQYVGTYLNWYQQKPGQAPRLLIYDASNRATGIPA
RFSGSGSGTDFTLTISSLEPEDFAVYYCQVWDNSPPVVFGGGTKVEIK
>
EIVLTQSPATLSLSPGERATITCRASQYVGSYLNWYQQKPGQAPRLLIYDAANRATGIPA
RFSGSGSGTDFTLTISSLEPEDFAVYYCQVWDSSPPVVFGGGTKVEIK
>
EIVLTQSPATLSLSPGERATITCRASQYIGSYLNWYQQKPGQAPRLLIYDASNRATGIPAR
FSGSGSGTDFTLTISSLEPEDFAVYYCQAWDSSPPVTFGDGTKVEIK
>
DIQMTQSPSSLSASVGDRVTITCRASQDVSNYLNWYQQKPGKAPKLLIYAASSLQSGVP
SRFSGSGSGTDFTLTISSLQPEDFATYYCQQSGSYLTFGGGTKVEIK
>
EIVLTQSPATLSLSPGERATITCQASQYVGSYLSWYQQKPGQAPRLLIYDASNRATGIPA
RFSGSGSGTDFTLTISSLEPEDFAVYYCQVWDSYHAVVFGGGTKVEIK
>
EIVLTQSPATLSLSPGERATITCQASQYVGSYLSWYQQKPGQAPRLLIYDASNRAAGIPA
RFSGSGSGTDFTLTISSLEPEDFAVYYCQVWGSYHAVMFGGGTKVEIK
>
EIVLTQSPATLSLSPGERATITCRASQYVGSYLSWYQQKPGQAPRLLIYDASNRAAGIPA
RFSGSGSGTDFTLNISSLEPEDFAVYYCQVWGSYHSVMFGGGTKVEIK
>
EIVLTQSPATLSLSPGERATITCQASQYVGSYLSWYQQKPGQAPRLLIYDASNRAAGIPA
RFSGSGSGTDFTLTISSLEPEDFAVYYCQVWDTDHSVVFGGGTKVEIK
>
EIVLTQSPATLSLSPGERATITCQASQYVGSYLSWYQQKPGQAPRLLIYDASNRATGIPA
RFSGSGSGTDFTLTISSLEPEDFAVYYCQVWDTDHAVAFGGGTKVEIK
>
EIVLTQSPATLSLSPGERATITCRASQYVGSYLSWYQQKPGQAPRLLIYDASNRASGIPA
RFSGSGSGTDFTLTISSLEPEDFAVYYCQVWDSSHSVIFGGGTKVEIK
>
EIVLTQSPATLSLSPGERATITCRASQYVGSYLSWYQQKPGQAPRLLIYDASNRATGIPA
RFSGSGSGTDFTLTISSLEPEDFAVYYCQVWDSYPPVVFGGGTKVEIK
>
EIVLTQSPATLSLSPGERATITCRASQYVGSYLSWYQQKPGQAPRLLIYDASNRATGIPA
RFSGSGSGTDFTLTISSLEPEDFAVYYCQVWDSYHAVVFGGGTKVEIK
>
EIVLTQSPATLSLSPGERATITCRASQYVGSYLSWYQQKPGQAPRLLIYDASNRASGIPA
RFSGSGSGTDFTLTISSLEPEDFAVYYCQVWDSDHAVVFGGGTKVEIK
>
EIVLTQSPATLSLSPGERATITCRASQYVGSYLNWYQQKPGQAPRLLIYDAANRATGIPA
RFSGSGSGTDFTLTISSLEPEDFAVYYCQVWGSNHASLFGGGTKVEIK
>
EIVLTQSPATLSLSPGERATITCRASQYVGSYLNWYQQKPGQAPRLLIYDAANRATGIPA
RFSGSGSGTDFTLTISSLEPEDFAVYYCQVWGSTARVAFGGGTKVEIK
>
EIVLTQSPATLSLSPGERATITCRASQYVGSYLNWYQQKPGQAPRLLIYDAANRATGIPA
RFSGSGSGTDFTLTISSLEPEDFAVYYCQVWNSTPPVVFGGGTKVEIK
>
EIVLTQSPATLSLSPGERATITCRASQYVGSYLNWYQQKPGQAPRLLIYDAANRATGIPA
RFSGSGSGTDFTLTISSLEPEDFAVYYCQVWSSSPPVIFGGGTKVEIK
>
EIVLTQSPATLSLSPGERATITCRASQYVGSYLNWYQQKPGQAPRLLIYDAANRATGIPA
RFSGSGSGTDFTLTISSLEPEDFAVYYCQVWSSSPPVVFGGGTKVEIK
>
EIVLTQSPATLSLSPGERATITCRASQYVGSYLNWYQQKPGQAPRLLIYDAANRATGIPA
RFSGSGSGTDFTLTISSLEPEDFAVYYCQVWSSNHAVVFGGGTKVEIK
>
EIVLTQSPATLSLSPGERATITCRASQYVGSYLNWYQQKPGQAPRLLIYDAANRATGIPA
RFSGSGSGTDFTLTISSLEPEDFAVYYCQVWGSNPPVAFGGGTKVEIK
>
EIVLTQSPATLSLSPGERATITCRASQYVGSYLNWYQQKPGQAPRLLIYDAANRATGIPA
RFSGSGSGTDFTLTISSLEPEDFAVYYCQVWDSTPPVVFGGGTKVEIK
>
EIVLTQSPATLSLSPGERATITCRASQYVGSYLNWYQQKPGQAPRLLIYDAANRATGIPA
RFSGSGSGTDFTLTISSLEPEDFAVYYCQVWDSNPPVVFGGGTKVEIK
>
EIVLTQSPATLSLSPGERATITCRASQYVGSYLNWYQQKPGQAPRLLIYDAANRATGIPA
RFSGSGSGTDFTLTISSLEPEDFAVYYCQGYSSNDGVIFGGGTKVEIK
>
EIVLTQSPATLSLSPGERATITCRASQYVGSYLNWYQQKPGQAPRLLIYDAANRATGIPA
RFSGSGSGTDFTLTISSLEPEDFAVYYCQVWGSNHSVVFGGGTKVEIK
>
EIVLTQSPATLSLSPGERATITCRASQYVGSYLNWYQQKPGQAPRLLIYDAANRATGIPA
RFSGSGSGTDFTLTISSLEPEDFAVYYCQVWDSNHSVVFGGGTKVEIK
>
EIVLTQSPATLSLSPGERATITCRASQYVGSYLNWYQQKPGQAPRLLIYDASNRAAGIPA
RFSGSGSGTDFTLTISSLEPEDFAVYYCQVWDSSPPVVFGGGTKVEIK
>
EIVLTQSPATLSLSPGERATITCRASQYVGSYLNWYQQKPGQAPRLLIYDASNRATGIPA
RFSGSGSGTDFTLTISSLEPEDFAVYYCQVWDSSSAVVFGGGTKVEIK
>
EIVLTQSPATLSLSPGERATITCRASQYVGSYLNWYQQKPGQAPRLLIYDASNRATGIPA
RFSGSGSGTDLTLTISSLEPEDFAVYYCQVWDSSPPVVFGGGTKVEIK
LIST OF VH-CDR1 SEQUENCES
>
KASGYTFSSYGMYWVR
>
KASGYTFSSYSIYWVR
>
KASGYTFSRQGFTWVR
>
KASGYTFSSYSFSWVR
>
KASGYTFSRYGINWVR
>
KASGYTFSRYGISWVR
>
KASGYTFSSYTNYWVR
>
KASGYTFSRYSYYWVR
>
KASGYTFSSYANTWVR
>
KASGYTFSSYGYYWVR
>
KASGYTFSRYAINWVR
>
KASGYTFSRYGIYWVR
>
KASGYTFSRYGYYWVR
>
KASGYTFSRYAYNWVR
>
KASGYTFSRYGFSWVR
>
KASGYTFSRYAFNWVR
>
KASGYTFSSYGYYWVR
>
KASGYTFSRYTITWVR
>
KASGYTFSRYSFIWVR
>
KASGYTFSRYTFYWVR
>
KASGQTFSSYGFNWVR
>
KASGYTFSRYANYWVR
>
KASGYTFSRYSNSWVR
>
KASGYTFSSYSITWVR
>
KASGYTFSSYTYTWVR
>
KASGYTFSSYSYYWVR
>
KASGYTFSSYGYSWVR
>
KASGYTFSRYTFSWVR
>
KASGYTFSSYGFSWVR
>
KASGYTFSSYGQSWVR
>
KASGYTFSSYAISWVR
>
KASGYTFSSYTYNWVR
>
KASGYTFSSYTISWVR
>
KASGYTFSRYTFNWVR
>
KGQRLPPRYGYYWVR
>
KASGYTYSRYTFSWVR
>
KASDYTFSSYGNNWVR
>
KASGYTFSSYGISWVR
>
KASGYTFSSYTINWVR
>
KASGFTFSAYGMYWVR
>
KASGFTFSDYGMYWVR
>
KASGFTFSSYQMSWVR
>
KASGFTFSYYYMYWVR
>
KASGFTFTAYGMYWVR
>
KASGFTFTSYQMSWVR
>
KASGFTFTSYWMSWVR
>
KASGLTFTDYGMYWVR
>
KASGYTFSYYGMYWVR
>
KASGYTFTDYGMYWVR
>
KASGYTFTNYGMNWVR
>
KASGYTFTSYGMYWVR
>
KASGYTFTSYWMSWVR
>
QASGYTFSSYGMYWVR
>
EASGFTFSSYGMYWVR
>
EASGFSFSNYGMYWVR
>
AASGYSFSAYYIHWVR
>
KASGFSFSSYGIYWVR
>
AASGYSFSTFGIYWVR
>
EASGFTFSDYGIHWVR
>
AASGYTFSDFGIYWVR
>
QASGYSFTTYGMYWVR
>
AASGFTFTNYGMYWVR
>
KASGYTFSYFGIYWVR
>
TASGFTFSNYGMYWVR
>
TASGYSFTAFGMYWVR
>
KASGFTFSSYGMYWVR
>
KASGYSFSAYGMYWVR
>
EASGYTFTSFQMHWVR
>
AASGYTFSSFSMYWVR
>
QASGYTFTNYGMYWVR
>
QASGYTFTAFGMYWVR
>
KASGFSFTSYGMYWVR
>
QASGFTFSTYGIYWVR
>
KASGFSFSSYGMYWVR
>
EASGYSFSNFGMYWVR
>
TASDFSFSTFSMYWVR
>
AASGYSFTSFGIYWVR
>
QASGFSFSDYYMSWVR
>
AASGYSFSDYGIYWVR
>
KASGYSFSTYYMYWVR
>
EASGYTFSAFQIYWVR
>
QASGFSFSNFYMYWVR
>
KASGFTFSAFGIYWVR
>
KASGYTFSTYGMYWVR
>
AASGYSFSTYGIYWVR
>
TASGFSFSAYGMYWVR
>
AASGFSFSNYYMYWVR
>
EASGYTFTSYGMYWR
>
KASGYTFSDFAMYWVR
>
KASGYSFTNFGMYWVR
>
AASGYSFSYYGMYWVR
>
EASGYSFSAFGIYWVR
>
KTSGYTFSAFQIYWVR
>
KASGYTFSSYGMYWMR
LIST OF VH-CDR2 SEQUENCES
>
WIGWIDPGSGGTKYNEKFKGKAT
>
WIGWIDPGNGGTRYNQKFQSKAT
>
WIGWIDPGNGGTRYNEKFKGKAT
>
WIGYIDPGSGGTKYNQKFQGKAT
>
WIGRIDPGNGGTRYNEKFKGKAT
>
QIGWIDPGSGGTRYNQKFKSKAT
>
WIGYIDPGSGGTRYNQKFQGKAT
>
WIGYIDPGSGGTKYNQKFQSKAT
>
WIGWIDPGNGGTSYNQKFKSKAT
>
WIGWIDPGSGGTRYNQKFKGKAT
>
WIGWIDPGSGGTRYNEKFKGQAT
>
WIGYIDPGSGGTRYNEKFKGKAT
>
WIGYIDPGNGGTSYNEKFKGKAT
>
WIGRIDPGSGGTRYNQQFQGKAT
>
WIGYIDPGSGGTRYNEKFQGKAT
>
WIGWIDPGSGGTRYNEKFQSKAT
>
WIGYIDPGSGGTKYNEKFQGKAT
>
WIGYIDPGSGGTKYNQKFKGKAT
>
WIGYIDPGSGGTRYNQKFKGKAT
>
WIGWIDPGSGGTRYNQKFKSKAT
>
WIGRIDPGSGGTSYNEKFQSKAT
>
WIGRIDPGNGGTRYNQKFQSKAT
>
WIGYIDPGSGGTKYNEKFKGKAT
>
WIGWIDPGSGGTRYNEKFKSKAT
>
WIGWIDPGNGGTRYNQQFKGKAT
>
WIGWIDPGSGGTRYNEKFEGKAT
>
WIGRIDPGSGGTRYNQKFQGKAT
>
WIGRIDPGSGGTKYNEKFKGKAT
>
WIGYIDPGNGGTRYNEQFKGKAT
>
WIGWIDPGNGGTRYNEQFQGKAT
>
WIGRIDPGSGGTRYNEKFQGKAT
>
WIGRIDPGSGGTRYNEKFQSKAT
>
WIGYIDPGNGGTNYNQKFQSKAT
>
WIGYIDPGNGGTRYNQQFQGKAT
>
WIGWIDPGSGGTRYNQKFQSKAT
>
WIGYIDPGNGGTRYNEKFQSKAT
>
WIGYIDPGSGGTRYNQKFKSKAT
>
WIGRIDPGNGGTRYNEKFQGKAT
>
WIGWIDPGNGGTKYNQKFQSKAT
>
WIGWIDPGSGGTRYNEKFQGKAT
>
WIGRIDPSNGGTKYNQKFKGKAT
>
WIGRINPNSGGTKYNEKFKGKAT
>
WIGRIDPGSGGTKYNQKFKGKAT
>
WVGRISPSGGSTYYADSVKGRFT
>
WIGRINPGSGGTKYDEKFKGRAT
>
WIGWINPDSGSTKYAEKFKGRAT
>
WIGRIDPSSGGTKYNQKFKGKAT
>
WVGRISPGGGTTYYADSVKGRFT
>
WIGRINPGSGGTNYDEKFKGRAT
>
WIGRINPKQRWFIKYNQKFKGKVT
>
WIGLDRPRQRWHQLNEKFQGRAT
>
SIGRIDPGSGGTKYNEKFQGRAT
>
WIGLDRPKQRVGTKYNQKFQGRVT
>
WIGLDRPRQRWPKYNEKFKGRAT
>
WIGLDRPKQRWHQYNEKFQGRAT
>
WIGSDRPRQRVAPKYNQKFKGRAT
>
WIGRIDPSSGGTKYNQKFQGRVT
>
WIGLDRPKQRGTKYNQKFQGRAT
>
WIGSDRPRQRWIQVQRKFKGRAT
>
WIGRIDPNSGGTKYNEKFQGRAT
>
WIGRINPSSGGTNYNEQFQGRAT
>
WIGSDRPRQRWHQVQPKVQGRAT
>
WIGRIDPNSGGTKQNEKFQGRAT
>
SIGRIDPGSGGTKYNQKFQGRAT
>
WIGLDRPRQRWHQVNEKFQGRAT
>
WIGRIDPGNGGTKYNEKFKGKVT
>
WIGRIDPGSGGTKYNEKFQGKVT
>
WIGQDRPKYGGTKYNEKFKGRVT
>
WIGRINPSNGGTKYNEKFKGRAT
>
WIGSDRPRQRWGTKYNEKFQGRVT
>
WIGWINPSNGGTKYNEKFKGRAT
>
WIGSDQPRQGGTKYNEKFKGRAT
>
WIGSDRPRQGGTKYNEKFKDRVT
>
WIGSDRPKQRGTKYNEKFKGKVT
>
SIGRINPGSGGTKYNEKFQGRAT
>
WIGSDRPKQRWHQVNEKFQGKVT
>
WIGRIDPDSGGTKYNEKFQGRAT
>
WIGRIDPGNGGTKYNEKFKGKAT
>
WIGRIDPGSGGTKYNEKFQGRAT
>
WIGRINPDNGGTKYNEKFQGRVT
>
WIGRDQPRQGGTNYNEKFQGRAT
>
WIGRINPNNGGTKYNEKFQGKAT
>
WIGSDRPRQGGTKYNEKFKGRVT
>
WIGRIDPGSGGTKYNEKFQGRVT
>
WIGSDRPKQRWAPKYNEKFKGRAT
>
WIGSDQPRQRWHQVQPKVQGRVT
>
WIGRNPGNGGTKQNEKFKGRAT
>
WIGRINPSSGGTKYNEKFKGRAT
>
WIGRINPNSGGTKYNEKFKGRVT
>
WIGRIDPGSGGTKYNQKFKGRTT
>
WIGWIDPGSGGTKYQDKFKGKAT
>
WIGWIDPGSGGTKYQEKFKGKVT
>
WIGWIDPGSGGTKYQEKFKGKAT
>
WIGWIDPGSGGTNYQEKFKGKAT
>
WIGWIDPGSGGTNYQQKFKGKAT
>
WIGWIDPGSGGTKYADKFKGKAT
>
WIGWIDPGSGGTKYEEKFKGKAT
>
WIGWIDPGSGGTKYNDKFKGKAT
>
WIGWIDPGSGGTKYYEKFKGKAT
>
WIGWIDPGSGGTKYEDKFEGKAT
>
WIGWIDPGSGGTNYTQKFKGKAT
>
WIGWIDPGSGGTKYSHKFKGKAT
LIST OF VH-CDR3 SEQUENCES
>
CARERYGYYFDYWGQ
>
CARARVGYSLDYWGQ
> CARYRVGYSLDYWGQ
>
CARQRVGYSLDYWGQ
>
CARANDGYSFDYWGQ
>
CARARVGYSFDYWGQ
>
CARSRVGYSFDYWGQ
>
CARYRSGYSLDYWGQ
>
CARERVGYSLDYWGQ
>
CARHRVGYSLDFWGQ
>SEQ 381
CARYHYGYSFDYWGQ
>
CARYHDGYSFDYWGQ
>
CARERFAYYLDYWGQ
>
CARSRDGYYFDYWGQ
>
CARARDGYSFDYWGQ
>
CARERAGYYLDYWGQ
>
CARHRVGYYFDYWGQ
>
CARANVGYSFDYWGQ
> CARARVG?SFDYWG
>
CARSHVGYYFDYWGQ
> CARHRVGYSLDYWGQ
>
CARSRVGYSLDYWGQ
>
CARYRDGYSFDYWGQ
>
CARDRVGYSLDYWGQ
>
CARQRVGYNLDYWGQ
>
CARQRVGYSLDYWGE
>
CARSRDGYSLDYWGQ
>
CARYRSGYYLDYWGQ
>
CARYRVGYSFDYWGQ
>
CARSRDGYSFDYWGQ
>
CARARDGYSLDYWGQ
>
CARHRVGYSFDYWGQ
>
CARADVGYSFDYWQ
>
CARGFVYYSFDYWGQ
>
CARGFIYYSFDYWGQ
>
CARGFLYYSFDYWGQ
>
CARGRIYYSFDYWGQ
>
CARGRFYYSFDYWGQ
>
CARGRLYYSLDYWGQ
>
CARGFIYYDFDYWGQ
>
CARGKIYYSFDYWGQ
>
CARGYLYYSFDYWGQ
CARGFIYYSLDYWGQ
>
CARGNLYYSLDYWGQ
>
CSRGKVGYSLDYWGQ
>
CARGSIGYNLDYWGQ
>
CARGRDGYSLDYWGQ
>
CAREKYGYYFDYWGQ
>
CARYKSGWYFDYWGQ
>
CARYRSGYYFDYWGQ
>
CARYKSGYYFDYWGQ
>
CAREKSGYYFDYWGQ
>
CARERSGYYFDYWGQ
LIST OF VK_CDR1
>
ITCRASQYVGTYLNWYQ
>
ITCRASQYVGSYLNWYQ
>
ITCRASQYIGSYLNWYQ
>
ITCRASQAISNYLTWYQ
>
ITCRASQYVGSYLTWYQ
>
ITCRASQDVSNYLNWYQ
>
ITCQASQYVGSYLSWYQ
>
ITCRASQYVGSYLSWYQ
LIST OF VK_CDR2
>
LIYDASNRNGIP
>
LIYAASSLQSGVP
>
LIYDAANRATGIP
>
LIYDASNRAAGIP
>
LIYDASNRASGIP
LIST OF VK_CDR3
>
YYCQVWDSSPPVAFGG
>
YYCQVWDSSPPVVFGG
>
YYCQVWDSSPPLVFGG
>
YYCQVWDSSPPLAFGG
>
YYCQAWDSSPPVVFGG
>
YYCQVWDSSPPVMFGG
> YYCQGWDSSPTFGG
>
YYCQVWDNSPPVVFGG
>
YYCQAWDSSPPVTFGD
>
YYCQQSGSYLTFGG
>
YYCQVWDSYHAVVFGG
>SEQ 448
YYCQVWGSYHAVMFGG
>
YYCQVWGSYHSVMFGG
>
YYCQVWDTDHSVVFGG
>
YYCQVWDTDHAVAFGG
>
YYCQVWDSSHSVIFGG
>
YYCQVWDSYPPVVFGG
>
YYCQVWDSDHAVVFGG
>
YYCQVWGSNHASLFGG
>
YYCQVWGSTARVAFGG
>
YYCQVWNSTPPVVFGG
>
YYCQVWSSSPPVTFGG
>SEQ
YYCQVWSSSPPVVFGG
>
YYCQVWSSNHAVVFGG
>
YYCQVWGSNPPVAFGG
>
YYCQVWDSTPPVVFGG
>
YYCQVWDSNPPVVFGG
>
YYCQGYSSNDGVIFGG
>
YYCQVWGSNHSVVFGG
>
YYCQVWDSNHSVVFGG
>
YYCQVWDSSSAVVFGG

The application's sequence listing, which the Patent Office published only in electronic form, follows.

SEQUENCE LISTING (2013 sequences)

SEQ ID NO: 1 - protein, 35 aa, Artificial Sequence
  Description of Artificial Sequence: Synthetic polypeptide
GRMKQLEDKVEELLSKNYHLENEVARLKKLVGERG

SEQ ID NO: 2 - protein, 16 aa, Artificial Sequence
  Description of Artificial Sequence: Synthetic peptide
  MOD_RES (5)..(5): Phe or Tyr
  MOD_RES (8)..(8): Ser or Thr
  MOD_RES (9)..(9): Asp, Gly, Asn or Ser
KASGXTFXXYYMHWVR

SEQ ID NO: 3 - protein, 16 aa, Artificial Sequence
  Description of Artificial Sequence: Synthetic peptide
  MOD_RES (5)..(5): Phe or Tyr
  MOD_RES (8)..(8): Ser or Thr
  MOD_RES (9)..(9): Asp, Gly, Asn or Ser
  MOD_RES (11)..(11): Ala, Gly, Ser or Trp
KASGXTFXXYXMHWVR

SEQ ID NO: 4 - protein, 16 aa, Artificial Sequence
  Description of Artificial Sequence: Synthetic peptide
  MOD_RES (5)..(5): Phe or Tyr
  MOD_RES (8)..(8): Ser or Thr
  MOD_RES (9)..(9): Asn or Ser
  MOD_RES (13)..(13): His, Pro, Ser or Tyr
KASGXTFXXYYMXWVR

SEQ ID NO: 5 - protein, 16 aa, Artificial Sequence
  Description of Artificial Sequence: Synthetic peptide
  MOD_RES (5)..(5): Phe or Tyr
  MOD_RES (8)..(8): Ser or Thr
  MOD_RES (9)..(9): Asn or Ser
  MOD_RES (11)..(11): Ala, Gly, Ser or Trp
  MOD_RES (13)..(13): His, Pro, Ser or Tyr
KASGXTFXXYXMXWVR

SEQ ID NO: 6 - protein, 16 aa, Artificial Sequence
  Description of Artificial Sequence: Synthetic peptide
  MOD_RES (5)..(5): Phe or Tyr
  MOD_RES (8)..(8): Ser or Thr
  MOD_RES (9)..(9): Ala, Asp, Ser or Tyr
  MOD_RES (13)..(13): His, Pro, Ser or Tyr
KASGXTFXXYYMXWVR

SEQ ID NO: 7 - protein, 16 aa, Artificial Sequence
  Description of Artificial Sequence: Synthetic peptide
  MOD_RES (5)..(5): Phe or Tyr
  MOD_RES (8)..(8): Ser or Thr
  MOD_RES (9)..(9): Ala, Asp, Ser or Tyr
  MOD_RES (11)..(11): Ala or Gly
  MOD_RES (13)..(13): His, Pro, Ser or Tyr
KASGXTFXXYXMXWVR

SEQ ID NO: 8 - protein, 16 aa, Artificial Sequence
  Description of Artificial Sequence: Synthetic peptide
  MOD_RES (5)..(5): Phe or Tyr
  MOD_RES (8)..(8): Ser or Thr
  MOD_RES (9)..(9): Asp, Gly, Asn or Ser
AASGXTFXXYYMHWVR

SEQ ID NO: 9 - protein, 16 aa, Artificial Sequence
  Description of Artificial Sequence: Synthetic peptide
  MOD_RES (5)..(5): Phe or Tyr
  MOD_RES (8)..(8): Ser or Thr
  MOD_RES (9)..(9): Asp, Gly, Asn or Ser
  MOD_RES (11)..(11): Ala, Gly, Ser or Trp
AASGXTFXXYXMHWVR

SEQ ID NO: 10 - protein, 16 aa, Artificial Sequence
  Description of Artificial Sequence: Synthetic peptide
  MOD_RES (5)..(5): Phe or Tyr
  MOD_RES (8)..(8): Ser or Thr
  MOD_RES (9)..(9): Asn or Ser
  MOD_RES (13)..(13): His or Asn
KASGXTFXXYYMXWVR

SEQ ID NO: 11 - protein, 16 aa, Artificial Sequence
  Description of Artificial Sequence: Synthetic peptide
  MOD_RES (5)..(5): Phe or Tyr
  MOD_RES (8)..(8): Ser or Thr
  MOD_RES (9)..(9): Asn or Ser
  MOD_RES (11)..(11): Ala, Gly, Ser or Trp
  MOD_RES (13)..(13): His or Asn
KASGXTFXXYXMXWVR

SEQ ID NO: 12 - protein, 16 aa, Artificial Sequence
  Description of Artificial Sequence: Synthetic peptide
  MOD_RES (6)..(6): Ser or Thr
  MOD_RES (9)..(9): Asp, Gly, Asn or Ser
  MOD_RES (11)..(11): Gly or Trp
  MOD_RES (12)..(12): Ile or Met
  MOD_RES (13)..(13): His or Asn
KASGYXFTXYXXXWVK

SEQ ID NO: 13 - protein, 17 aa, Artificial Sequence
  Description of Artificial Sequence: Synthetic peptide
  MOD_RES (8)..(8): Ser or Thr
  MOD_RES (10)..(10): Asp or Gly
  MOD_RES (12)..(12): Ala, Asp, Phe, His, Leu, Pro, Ser, Val or Tyr
  MOD_RES (14)..(14): Asp, Gly, His, Asn, Arg or Ser
TVTGYSIXSXYXWXWIR

SEQ ID NO: 14 - protein, 18 aa, Artificial Sequence
  Description of Artificial Sequence: Synthetic peptide
  MOD_RES (8)..(8): Ser or Thr
  MOD_RES (10)..(10): Ser or Thr
  MOD_RES (12)..(12): Met or Val
  MOD_RES (15)..(15): Ala, Gly, Ser or Thr
TFSGFSLXTXGXGVXWIR

SEQ ID NO: 15 - protein, 18 aa, Artificial Sequence
  Description of Artificial Sequence: Synthetic peptide
  MOD_RES (5)..(5): Asp or Gly
  MOD_RES (8)..(8): Asn or Ser
  MOD_RES (11)..(11): Ala, Asp, Gly, Asn, Ser or Thr
  MOD_RES (15)..(15): Gly or Ser
TVSGXSIXSGXYYWXWIR

SEQ ID NO: 16 - protein, 22 aa, Artificial Sequence
  Description of Artificial Sequence: Synthetic peptide
  MOD_RES (7)..(7): Ser or Tyr
  MOD_RES (8)..(8): Ala, Asp, Ser or Tyr
  MOD_RES (14)..(14): Ala, Asp, Asn or Thr
  MOD_RES (15)..(15): Ala, Asp, His or Pro
  MOD_RES (17)..(17): Leu or Val
  MOD_RES (19)..(19): Gly or Ser
WVGYISXXGSTYYXXSXKXRFT

SEQ ID NO: 17 - protein, 22 aa, Artificial Sequence
  Description of Artificial Sequence: Synthetic peptide
  MOD_RES (4)..(4): Ala, Ser, Val, Asp, Glu, Phe, Leu or Tyr
  MOD_RES (6)..(6): Asn, Ser, Thr or Tyr
  MOD_RES (7)..(7): His or Tyr
  MOD_RES (12)..(12): Asn or Tyr
WIGXIXXSGSTXYNPSLKSRVT

SEQ ID NO: 18 - protein, 22 aa, Artificial Sequence
  Description of Artificial Sequence: Synthetic peptide
  MOD_RES (4)..(4): Ala, Ser, Val, Asp, Glu, Phe, Leu or Tyr
  MOD_RES (7)..(7): His or Tyr
  MOD_RES (12)..(12): Asn or Tyr
WIGXIWXSGSTXYNPSLKSRVT

SEQ ID NO: 19 - protein, 23 aa, Artificial Sequence
  Description of Artificial Sequence: Synthetic peptide
  MOD_RES (6)..(6): Asn or Ser
  MOD_RES (8)..(8): Asp, Gly, Asn or Ser
  MOD_RES (11)..(11): Asp, Gly, Asn or Ser
  MOD_RES (18)..(18): Phe or Val
WVGRIXPXGGXTYYADSXKGRFT

SEQ ID NO: 20 - protein, 23 aa, Artificial Sequence
  Description of Artificial Sequence: Synthetic peptide
  MOD_RES (4)..(4): Arg or Trp
  MOD_RES (6)..(6): Asp or Asn
  MOD_RES (8)..(8): Asp, Gly, Asn or Ser
  MOD_RES (9)..(9): Asn or Ser
  MOD_RES (13)..(13): Lys or Asn
  MOD_RES (16)..(16): Glu or Gln
WIGXIXPXXGGTXYNXKFKGKAT

SEQ ID NO: 21 - protein, 23 aa, Artificial Sequence
  Description of Artificial Sequence: Synthetic peptide
  MOD_RES (6)..(6): Asn, Ser, Thr or Tyr
  MOD_RES (10)..(10): Gly or Ser
  MOD_RES (12)..(12): Asn, Ser, Thr or Tyr
  MOD_RES (16)..(16): Ala, Asp, Ser or Tyr
  MOD_RES (19)..(19): Lys, Asn, Arg or Ser
WMGYIXYSGXTXYNPXLKXRISI

SEQ ID NO: 22 - protein, 23 aa, Artificial Sequence
  Description of Artificial Sequence: Synthetic peptide
  MOD_RES (6)..(6): Asp or Asn
  MOD_RES (8)..(8): Asn or Tyr
  MOD_RES (9)..(9): Asn or Ser
  MOD_RES (13)..(13): Lys or Asn
  MOD_RES (16)..(16): Glu or Gln
  MOD_RES (20)..(20): Gly or Ser
WIGRIXPXXGGTXYNXKFKXKAT

SEQ ID NO: 23 - protein, 23 aa, Artificial Sequence
  Description of Artificial Sequence: Synthetic peptide
  MOD_RES (6)..(6): Asp or Asn
  MOD_RES (8)..(8): Ser or Tyr
  MOD_RES (9)..(9): Asn or Ser
  MOD_RES (13)..(13): Lys or Asn
  MOD_RES (16)..(16): Glu or Gln
WIGRIXPXXGGTXYNXKFKGKAT

SEQ ID NO: 24 - protein, 23 aa, Artificial Sequence
  Description of Artificial Sequence: Synthetic peptide
  MOD_RES (6)..(6): Asp or Asn
  MOD_RES (8)..(8): Asp, Gly, Asn or Ser
  MOD_RES (9)..(9): Asn or Ser
  MOD_RES (13)..(13): Lys or Asn
  MOD_RES (16)..(16): Glu or Gln
WIGRIXPXXGGTXYNXKFKGKAT

SEQ ID NO: 25 - protein, 25 aa, Artificial Sequence
  Description of Artificial Sequence: Synthetic peptide
  MOD_RES (7)..(7): Asn or Ser
  MOD_RES (9)..(9): Ala, Ser or Thr
  MOD_RES (10)..(10): Asp or Asn
  MOD_RES (15)..(15): Asp or Glu
WVGRIRXKXXGYTTXYAASVKGRFT

SEQ ID NO: 26 - protein, 25 aa, Artificial Sequence
  Description of Artificial Sequence: Synthetic peptide
  MOD_RES (7)..(7): Asn or Ser
  MOD_RES (9)..(9): Ala, Ser or Thr
  MOD_RES (10)..(10): Asp or Asn
  MOD_RES (15)..(15): Asp or Glu
WVGRIRXKXXGGTTXYAASVKGRFT

SEQ ID NO: 27 - protein, 25 aa, Artificial Sequence
  Description of Artificial Sequence: Synthetic peptide
  MOD_RES (4)..(4): Asp or Tyr
  MOD_RES (9)..(9): Asn or Ser
  MOD_RES (13)..(13): Lys, Asn, Arg or Ser
  MOD_RES (16)..(16): Glu or Gln
WIGXIYPGXGGTXYNXKFKGKATLT

SEQ ID NO: 28 - protein, 25 aa, Artificial Sequence
  Description of Artificial Sequence: Synthetic peptide
  MOD_RES (4)..(4): Arg or Trp
  MOD_RES (9)..(9): Asn or Ser
  MOD_RES (13)..(13): Lys, Asn, Arg or Ser
  MOD_RES (16)..(16): Glu or Gln
WIGXIYPGXGGTXYNXKFKGKATLT

SEQ ID NO: 29 - protein, 11 aa, Artificial Sequence
  Description of Artificial Sequence: Synthetic peptide
  MOD_RES (4)..(4): Leu, Ile, Val, Asp, Glu, Phe, His, Lys, Asn, Gln or Tyr
  MOD_RES (5)..(6): Phe, Leu or Tyr
  MOD_RES (7)..(7): Ala or Asp
CARXXXXYWGQ

SEQ ID NO: 30 - protein, 11 aa, Artificial Sequence
  Description of Artificial Sequence: Synthetic peptide
  MOD_RES (4)..(4): Ala, Gly, Pro, Arg, Ser or Trp
  MOD_RES (5)..(6): Phe, Leu or Tyr
  MOD_RES (7)..(7): Ala or Asp
CARXXXXYWGQ

SEQ ID NO: 31 - protein, 11 aa, Artificial Sequence
  Description of Artificial Sequence: Synthetic peptide
  MOD_RES (4)..(4): Leu, Gln, Val, Asp, Glu, Phe, His, Ile, Lys, Met, Asn or Tyr
  MOD_RES (5)..(5): Ala, Gly, Thr, Asp, Glu, Lys, Asn, Arg or Ser
  MOD_RES (6)..(6): Phe, Leu or Tyr
  MOD_RES (7)..(7): Ala or Asp
CARXXXXYWGQ

SEQ ID NO: 32 - protein, 11 aa, Artificial Sequence
  Description of Artificial Sequence: Synthetic peptide
  MOD_RES (4)..(4): Ala, Gly, Pro, Arg, Ser or Trp
  MOD_RES (5)..(5): Ala, Gly, Thr, Asp, Glu, Lys, Asn, Arg or Ser
  MOD_RES (6)..(6): Phe, Leu or Tyr
  MOD_RES (7)..(7): Ala or Asp
CARXXXXYWGQ

SEQ ID NO: 33 - protein, 11 aa, Artificial Sequence
  Description of Artificial Sequence: Synthetic peptide
  MOD_RES (4)..(4): Leu, Ile, Val, Asp, Glu, Phe, His, Lys, Asn, Gln or Tyr
  MOD_RES (5)..(5): Phe, Leu or Tyr
  MOD_RES (6)..(6): Gly, Met, Arg or Val
  MOD_RES (7)..(7): Ala or Asp
CARXXXXYWGQ

SEQ ID NO: 34 - protein, 11 aa, Artificial Sequence
  Description of Artificial Sequence: Synthetic peptide
  MOD_RES (4)..(4): Ala, Gly, Pro, Arg, Ser or Trp
  MOD_RES (5)..(5): Phe, Leu or Tyr
  MOD_RES (6)..(6): Gly, Met, Arg or Val
  MOD_RES (7)..(7): Ala or Asp
CARXXXXYWGQ

SEQ ID NO: 35 - protein, 11 aa, Artificial Sequence
  Description of Artificial Sequence: Synthetic peptide
  MOD_RES (4)..(4): Leu, Ile, Val, Asp, Glu, Phe, His, Lys, Asn, Gln or Tyr
  MOD_RES (5)..(5): Ala, Gly, Thr, Asp, Glu, Lys, Asn, Arg or Ser
  MOD_RES (6)..(6): Gly, Met, Arg or Val
  MOD_RES (7)..(7): Ala or Asp
CARXXXXYWGQ

SEQ ID NO: 36 - protein, 11 aa, Artificial Sequence
  Description of Artificial Sequence: Synthetic peptide
  MOD_RES (4)..(4): Ala, Gly, Pro, Arg, Ser or Trp
  MOD_RES (5)..(5): Ala, Gly, Thr, Asp, Glu, Lys, Asn, Arg or Ser
  MOD_RES (6)..(6): Gly, Met, Arg or Val
  MOD_RES (7)..(7): Ala or Asp
CARXXXXYWGQ

SEQ ID NO: 37 - protein, 11 aa, Artificial Sequence
  Description of Artificial Sequence: Synthetic peptide
  MOD_RES (4)..(4): Ala, Glu, Lys or Thr
  MOD_RES (5)..(5): Ala, Gly, Thr, Asp, Glu, Lys, Asn, Arg or Ser
  MOD_RES (6)..(6): Phe or Leu
  MOD_RES (7)..(7): Ala or Asp
CARXXXXYWGQ

SEQ ID NO: 38 - protein, 11 aa, Artificial Sequence
  Description of Artificial Sequence: Synthetic peptide
  MOD_RES (4)..(4): Ala, Thr, Asp, Glu, Lys or Asn
  MOD_RES (5)..(5): Phe, His, Leu, Pro, Ser or Tyr
  MOD_RES (6)..(6): Gly, Met, Arg or Val
  MOD_RES (7)..(7): Ala or Asp
CARXXXXYWGQ

SEQ ID NO: 39 - protein, 11 aa, Artificial Sequence
  Description of Artificial Sequence: Synthetic peptide
  MOD_RES (4)..(4): Ala, Glu, Lys or Thr
  MOD_RES (5)..(5): Ala, Gly, Thr, Asp, Glu, Lys, Asn, Arg or Ser
  MOD_RES (6)..(6): Gly, Met, Arg or Val
  MOD_RES (7)..(7): Ala or Asp
CARXXXXYWGQ

SEQ ID NO: 40 - protein, 11 aa, Artificial Sequence
  Description of Artificial Sequence: Synthetic peptide
  MOD_RES (4)..(4): Asp, Phe, His, Ile, Leu, Asn, Val or Tyr
  MOD_RES (5)..(5): Phe, His, Leu, Pro, Ser or Tyr
  MOD_RES (6)..(6): Phe or Leu
  MOD_RES (7)..(7): Ala or Asp
CARXXXXYWGQ

SEQ ID NO: 41 - protein, 11 aa, Artificial Sequence
  Description of Artificial Sequence: Synthetic peptide
  MOD_RES (4)..(4): Gly, Arg or Trp
  MOD_RES (5)..(5): Phe, His, Leu, Pro, Ser or Tyr
  MOD_RES (6)..(6): Phe or Leu
  MOD_RES (7)..(7): Ala or Asp
CARXXXXYWGQ

SEQ ID NO: 42 - protein, 11 aa, Artificial Sequence
  Description of Artificial Sequence: Synthetic peptide
  MOD_RES (4)..(4): Asp, Phe, His, Ile, Leu, Asn, Val or Tyr
  MOD_RES (5)..(5): Ala, Gly, Thr, Asp, Glu, Lys, Asn, Arg or Ser
  MOD_RES (6)..(6): Phe or Leu
  MOD_RES (7)..(7): Ala or Asp
CARXXXXYWGQ

SEQ ID NO: 43 - protein, 11 aa, Artificial Sequence
  Description of Artificial Sequence: Synthetic peptide
  MOD_RES (4)..(4): Gly, Arg or Trp
  MOD_RES (5)..(5): Ala, Gly, Thr, Asp, Glu, Lys, Asn, Arg or Ser
  MOD_RES (6)..(6): Phe or Leu
  MOD_RES (7)..(7): Ala or Asp
CARXXXXYWGQ

SEQ ID NO: 44 - protein, 11 aa, Artificial Sequence
  Description of Artificial Sequence: Synthetic peptide
  MOD_RES (4)..(4): Asp, Phe, His, Ile, Leu, Asn, Val or Tyr
  MOD_RES (5)..(5): Phe, His, Leu, Pro, Ser or Tyr
  MOD_RES (6)..(6): Gly, Met, Arg or Val
  MOD_RES (7)..(7): Ala or Asp
CARXXXXYWGQ

SEQ ID NO: 45 - protein, 11 aa, Artificial Sequence
  Description of Artificial Sequence: Synthetic peptide
  MOD_RES (4)..(4): Gly, Arg or Trp
  MOD_RES (5)..(5): Phe, His, Leu, Pro, Ser or Tyr
  MOD_RES (6)..(6): Gly, Met, Arg or Val
  MOD_RES (7)..(7): Ala or Asp
CARXXXXYWGQ

SEQ ID NO: 46 - protein, 11 aa, Artificial Sequence
  Description of Artificial Sequence: Synthetic peptide
  MOD_RES (4)..(4): Asp, Phe, His, Ile, Leu, Asn, Val or Tyr
  MOD_RES (5)..(5): Ala, Gly, Thr, Asp, Glu, Lys, Asn, Arg or Ser
  MOD_RES (6)..(6): Gly, Met, Arg or Val
  MOD_RES (7)..(7): Ala or Asp
CARXXXXYWGQ

SEQ ID NO: 47 - protein, 11 aa, Artificial Sequence
  Description of Artificial Sequence: Synthetic peptide
  MOD_RES (4)..(4): Gly, Arg or Trp
  MOD_RES (5)..(5): Ala, Gly, Thr, Asp, Glu, Lys, Asn, Arg or Ser
  MOD_RES (6)..(6): Gly, Met, Arg or Val
  MOD_RES (7)..(7): Ala or Asp
CARXXXXYWGQ

SEQ ID NO: 48 - protein, 11 aa, Artificial Sequence
  Description of Artificial Sequence: Synthetic peptide
  MOD_RES (4)..(4): Ala, Thr, Asp, Glu, Lys or Asn
  MOD_RES (5)..(5): Phe, His, Leu, Pro, Ser or Tyr
  MOD_RES (6)..(6): Phe or Leu
  MOD_RES (7)..(7): Ala or Asp
CARXXXXYWGQ

SEQ ID NO: 49 - protein, 13 aa, Artificial Sequence
  Description of Artificial Sequence: Synthetic peptide
  MOD_RES (4)..(4): Gly or Arg
  MOD_RES (5)..(6): Ser or Tyr
  MOD_RES (8)..(8): Phe, Ile, Leu or Met
  MOD_RES (9)..(9): Ala or Asp
  MOD_RES (10)..(10): Asp, Phe, Val or Tyr
CARXXXYXXXWGQ

SEQ ID NO: 50 - protein, 13 aa, Artificial Sequence
  Description of Artificial Sequence: Synthetic peptide
  MOD_RES (4)..(4): Gly or Arg
  MOD_RES (5)..(5): Asp, Gly, His or Arg
  MOD_RES (6)..(6): Ser or Tyr
  MOD_RES (8)..(8): Phe, Ile, Leu or Met
  MOD_RES (9)..(9): Ala or Asp
  MOD_RES (10)..(10): Asp, Phe, Val or Tyr
CARXXXYXXXWGQ

SEQ ID NO: 51 - protein, 13 aa, Artificial Sequence
  Description of Artificial Sequence: Synthetic peptide
  MOD_RES (4)..(4): Gly or Arg
  MOD_RES (5)..(5): Ser or Tyr
  MOD_RES (6)..(6): Ala, Gly, Ser or Thr
  MOD_RES (8)..(8): Phe, Ile, Leu or Met
  MOD_RES (9)..(9): Ala or Asp
  MOD_RES (10)..(10): Asp, Phe, Val or Tyr
CARXXXYXXXWGQ

SEQ ID NO: 52 - protein, 13 aa, Artificial Sequence
  Description of Artificial Sequence: Synthetic peptide
  MOD_RES (4)..(4): Gly or Arg
  MOD_RES (5)..(5): Asp, Gly, His or Arg
  MOD_RES (6)..(6): Ala, Gly, Ser or Thr
  MOD_RES (8)..(8): Phe, Ile, Leu or Met
  MOD_RES (9)..(9): Ala or Asp
  MOD_RES (10)..(10): Asp, Phe, Val or Tyr
CARXXXYXXXWGQ

SEQ ID NO: 53 - protein, 13 aa, Artificial Sequence
  Description of Artificial Sequence: Synthetic peptide
  MOD_RES (4)..(4): Gly or Arg
  MOD_RES (5)..(6): Ser or Tyr
  MOD_RES (7)..(7): Ala or Gly
  MOD_RES (8)..(8): Phe, Ile, Leu or Met
  MOD_RES (9)..(9): Ala or Asp
  MOD_RES (10)..(10): Asp, Phe, Val or Tyr
CARXXXXXXXWGQ

SEQ ID NO: 54 - protein, 13 aa, Artificial Sequence
  Description of Artificial Sequence: Synthetic peptide
  MOD_RES (4)..(4): Gly or Arg
  MOD_RES (5)..(5): Asp, Gly, His or Arg
  MOD_RES (6)..(6): Ser or Tyr
  MOD_RES (7)..(7): Ala or Gly
  MOD_RES (8)..(8): Phe, Ile, Leu or Met
  MOD_RES (9)..(9): Ala or Asp
  MOD_RES (10)..(10): Asp, Phe, Val or Tyr
CARXXXXXXXWGQ

SEQ ID NO: 55 - protein, 13 aa, Artificial Sequence
  Description of Artificial Sequence: Synthetic peptide
  MOD_RES (4)..(4): Gly or Arg
  MOD_RES (5)..(5): Ser or Tyr
  MOD_RES (6)..(6): Ala, Gly, Ser or Thr
  MOD_RES (7)..(7): Ala or Gly
  MOD_RES (8)..(8): Phe, Ile, Leu or Met
  MOD_RES (9)..(9): Ala or Asp
  MOD_RES (10)..(10): Asp, Phe, Val or Tyr
CARXXXXXXXWGQ

SEQ ID NO: 56 - protein, 13 aa, Artificial Sequence
  Description of Artificial Sequence: Synthetic peptide
  MOD_RES (4)..(4): Gly or Arg
  MOD_RES (5)..(5): Asp, Gly, His or Arg
  MOD_RES (6)..(6): Ala, Gly, Ser or Thr
  MOD_RES (7)..(7): Ala or Gly
  MOD_RES (8)..(8): Phe, Ile, Leu or Met
  MOD_RES (9)..(9): Ala or Asp
  MOD_RES (10)..(10): Asp, Phe, Val or Tyr
CARXXXXXXXWGQ

SEQ ID NO: 57 - protein, 13 aa, Artificial Sequence
  Description of Artificial Sequence: Synthetic peptide
  MOD_RES (7)..(7): Ala, Asp or Gly
  MOD_RES (8)..(8): Phe, Ile, Leu or Met
  MOD_RES (9)..(9): Ala or Asp
CARGYYXXXYWGQ

SEQ ID NO: 58 - protein, 13 aa, Artificial Sequence
  Description of Artificial Sequence: Synthetic peptide
  MOD_RES (4)..(4): Ser or Tyr
  MOD_RES (5)..(5): Asp, Gly, His, Asn, Arg or Ser
  MOD_RES (7)..(7): Ala, Asp or Gly
  MOD_RES (8)..(8): Phe, Ile, Leu or Met
  MOD_RES (9)..(9): Ala or Asp
CARXXYXXXYWGQ

SEQ ID NO: 59 - protein, 13 aa, Artificial Sequence
  Description of Artificial Sequence: Synthetic peptide
  MOD_RES (5)..(5): Asp, Gly, His, Asn, Arg or Ser
  MOD_RES (7)..(7): Ala, Asp or Gly
  MOD_RES (8)..(8): Phe, Ile, Leu or Met
  MOD_RES (9)..(9): Ala or Asp
CARGXYXXXYWGQ

SEQ ID NO: 60 - protein, 13 aa, Artificial Sequence
  Description of Artificial Sequence: Synthetic peptide
  MOD_RES (4)..(4): Ser or Tyr
  MOD_RES (6)..(6): Gly or Trp
  MOD_RES (7)..(7): Ala, Asp or Gly
  MOD_RES (8)..(8): Phe, Ile, Leu or Met
  MOD_RES (9)..(9): Ala or Asp
CARXYXXXXYWGQ

SEQ ID NO: 61 - protein, 13 aa, Artificial Sequence
  Description of Artificial Sequence: Synthetic peptide
  MOD_RES (6)..(6): Gly or Trp
  MOD_RES (7)..(7): Ala, Asp or Gly
  MOD_RES (8)..(8): Phe, Ile, Leu or Met
  MOD_RES (9)..(9): Ala or Asp
CARGYXXXXYWGQ

SEQ ID NO: 62 - protein, 13 aa, Artificial Sequence
  Description of Artificial Sequence: Synthetic peptide
  MOD_RES (4)..(4): Ser or Tyr
  MOD_RES (5)..(5): Asp, Gly, His, Asn, Arg or Ser
  MOD_RES (6)..(6): Gly or Trp
  MOD_RES (7)..(7): Ala, Asp or Gly
  MOD_RES (8)..(8): Phe, Ile, Leu or Met
  MOD_RES (9)..(9): Ala or Asp
CARXXXXXXYWGQ

SEQ ID NO: 63 - protein, 13 aa, Artificial Sequence
  Description of Artificial Sequence: Synthetic peptide
  MOD_RES (5)..(5): Asp, Gly, His, Asn, Arg or Ser
  MOD_RES (6)..(6): Gly or Trp
  MOD_RES (7)..(7): Ala, Asp or Gly
  MOD_RES (8)..(8): Phe, Ile, Leu or Met
  MOD_RES (9)..(9): Ala or Asp
CARGXXXXXYWGQ

SEQ ID NO: 64 - protein, 13 aa, Artificial Sequence
  Description of Artificial Sequence: Synthetic peptide
  MOD_RES (4)..(4): Ser or Tyr
  MOD_RES (7)..(7): Ser or Tyr
  MOD_RES (8)..(8): Phe, Ile, Leu or Met
  MOD_RES (9)..(9): Ala or Asp
CARXYYXXXYWGQ

SEQ ID NO: 65 - protein, 13 aa, Artificial Sequence
  Description of Artificial Sequence: Synthetic peptide
  MOD_RES (7)..(7): Ser or Tyr
  MOD_RES (8)..(8): Phe, Ile, Leu or Met
  MOD_RES (9)..(9): Ala or Asp
CARGYYXXXYWGQ

SEQ ID NO: 66 - protein, 13 aa, Artificial Sequence
  Description of Artificial Sequence: Synthetic peptide
  MOD_RES (4)..(4): Ser or Tyr
  MOD_RES (5)..(5): Asp, Gly, His, Asn, Arg or Ser
  MOD_RES (7)..(7): Ser or Tyr
  MOD_RES (8)..(8): Phe, Ile, Leu or Met
  MOD_RES (9)..(9): Ala or Asp
CARXXYXXXYWGQ

SEQ ID NO: 67 - protein, 13 aa, Artificial Sequence
  Description of Artificial Sequence: Synthetic peptide
  MOD_RES (5)..(5): Asp, Gly, His, Asn, Arg or Ser
  MOD_RES (7)..(7): Ser or Tyr
  MOD_RES (8)..(8): Phe, Ile, Leu or Met
  MOD_RES (9)..(9): Ala or Asp
CARGXYXXXYWGQ

SEQ ID NO: 68 - protein, 13 aa, Artificial Sequence
  Description of Artificial Sequence: Synthetic peptide
  MOD_RES (4)..(4): Ser or Tyr
  MOD_RES (6)..(6): Gly or Trp
  MOD_RES (7)..(7): Ser or Tyr
  MOD_RES (8)..(8): Phe, Ile, Leu or Met
  MOD_RES (9)..(9): Ala or Asp
CARXYXXXXYWGQ

SEQ ID NO: 69 - protein, 13 aa, Artificial Sequence
  Description of Artificial Sequence: Synthetic peptide
  MOD_RES (6)..(6): Gly or Trp
  MOD_RES (7)..(7): Ser or Tyr
  MOD_RES (8)..(8): Phe, Ile, Leu or Met
  MOD_RES (9)..(9): Ala or Asp
CARGYXXXXYWGQ

SEQ ID NO: 70 - protein, 13 aa, Artificial Sequence
  Description of Artificial Sequence: Synthetic peptide
  MOD_RES (4)..(4): Ser or Tyr
  MOD_RES (5)..(5): Asp, Gly, His, Asn, Arg or Ser
  MOD_RES (6)..(6): Gly or Trp
  MOD_RES (7)..(7): Ser or Tyr
  MOD_RES (8)..(8): Phe, Ile, Leu or Met
  MOD_RES (9)..(9): Ala or Asp
CARXXXXXXYWGQ

SEQ ID NO: 71 - protein, 13 aa, Artificial Sequence
  Description of Artificial Sequence: Synthetic peptide
  MOD_RES (5)..(5): Asp, Gly, His, Asn, Arg or Ser
  MOD_RES (6)..(6): Gly or Trp
  MOD_RES (7)..(7): Ser or Tyr
  MOD_RES (8)..(8): Phe, Ile, Leu or Met
  MOD_RES (9)..(9): Ala or Asp
CARGXXXXXYWGQ

SEQ ID NO: 72 - protein, 13 aa, Artificial Sequence
  Description of Artificial Sequence: Synthetic peptide
  MOD_RES (4)..(4): Ser or Tyr
  MOD_RES (7)..(7): Ala, Asp or Gly
  MOD_RES (8)..(8): Phe, Ile, Leu or Met
  MOD_RES (9)..(9): Ala or Asp
CARXYYXXXYWGQ

SEQ ID NO: 73 - protein, 14 aa, Artificial Sequence
  Description of Artificial Sequence: Synthetic peptide
  MOD_RES (4)..(4): Asp, Gly, His or Arg
  MOD_RES (5)..(6): Ser or Tyr
  MOD_RES (7)..(7): Asp or Gly
  MOD_RES (8)..(8): Ala, Asp, Ser or Tyr
  MOD_RES (9)..(9): Phe, Ile, Leu or Met
CARXXXXXXDYWGQ

SEQ ID NO: 74 - protein, 14 aa, Artificial Sequence
  Description of Artificial Sequence: Synthetic peptide
  MOD_RES (4)..(4): Ser or Tyr
  MOD_RES (5)..(5): Asp, Gly, His or Arg
  MOD_RES (6)..(6): Ser or Tyr
  MOD_RES (7)..(7): Asp or Gly
  MOD_RES (8)..(8): Ala, Asp, Ser or Tyr
  MOD_RES (9)..(9): Phe, Ile, Leu or Met
CARXXXXXXDYWGQ

SEQ ID NO: 75 - protein, 14 aa, Artificial Sequence
  Description of Artificial Sequence: Synthetic peptide
  MOD_RES (4)..(5): Asp, Gly, His or Arg
  MOD_RES (6)..(6): Ser or Tyr
  MOD_RES (7)..(7): Asp or Gly
  MOD_RES (8)..(8): Ala, Asp, Ser or Tyr
  MOD_RES (9)..(9): Phe, Ile, Leu or Met
CARXXXXXXDYWGQ

SEQ ID NO: 76 - protein, 14 aa, Artificial Sequence
  Description of Artificial Sequence: Synthetic peptide
  MOD_RES (4)..(5): Ser or Tyr
  MOD_RES (7)..(7): Asp or Gly
  MOD_RES (8)..(8): Ala, Asp, Ser or Tyr
  MOD_RES (9)..(9): Phe, Ile, Leu or Met
CARXXGXXXDYWGQ

SEQ ID NO: 77 - protein, 14 aa, Artificial Sequence
  Description of Artificial Sequence: Synthetic peptide
  MOD_RES (4)..(4): Asp, Gly, His or Arg
  MOD_RES (5)..(5): Ser or Tyr
  MOD_RES (7)..(7): Asp or Gly
  MOD_RES (8)..(8): Ala, Asp, Ser or Tyr
  MOD_RES (9)..(9): Phe, Ile, Leu or Met
CARXXGXXXDYWGQ

SEQ ID NO: 78 - protein, 14 aa, Artificial Sequence
  Description of Artificial Sequence: Synthetic peptide
  MOD_RES (4)..(4): Ser or Tyr
  MOD_RES (5)..(5): Asp, Gly, His or Arg
  MOD_RES (7)..(7): Asp or Gly
  MOD_RES (8)..(8): Ala, Asp, Ser or Tyr
  MOD_RES (9)..(9): Phe, Ile, Leu or Met
CARXXGXXXDYWGQ

SEQ ID NO: 79 - protein, 14 aa, Artificial Sequence
  Description of Artificial Sequence: Synthetic peptide
  MOD_RES (4)..(5): Asp, Gly, His or Arg
  MOD_RES (7)..(7): Asp or Gly
  MOD_RES (8)..(8): Ala, Asp, Ser or Tyr
  MOD_RES (9)..(9): Phe, Ile, Leu or Met
CARXXGXXXDYWGQ

SEQ ID NO: 80 - protein, 14 aa, Artificial Sequence
  Description of Artificial Sequence: Synthetic peptide
  MOD_RES (4)..(6): Ser or Tyr
  MOD_RES (8)..(8): Ala, Asp, Ser or Tyr
  MOD_RES (9)..(9): Phe, Ile, Leu or Met
CARXXXYXXDYWGQ

SEQ ID NO: 81 - protein, 14 aa, Artificial Sequence
  Description of Artificial Sequence: Synthetic peptide
  MOD_RES (4)..(4): Asp, Gly, His or Arg
  MOD_RES (5)..(6): Ser or Tyr
  MOD_RES (8)..(8): Ala, Asp, Ser or Tyr
  MOD_RES (9)..(9): Phe, Ile, Leu or Met
CARXXXYXXDYWGQ

SEQ ID NO: 82 - protein, 14 aa, Artificial Sequence
  Description of Artificial Sequence: Synthetic peptide
  MOD_RES (4)..(4): Ser or Tyr
  MOD_RES (5)..(5): Asp, Gly, His or Arg
  MOD_RES (6)..(6): Ser or Tyr
  MOD_RES (8)..(8): Ala, Asp, Ser or Tyr
  MOD_RES (9)..(9): Phe, Ile, Leu or Met
CARXXXYXXDYWGQ

SEQ ID NO: 83 - protein, 14 aa, Artificial Sequence
  Description of Artificial Sequence: Synthetic peptide
  MOD_RES (4)..(5): Asp, Gly, His or Arg
  MOD_RES (6)..(6): Ser or Tyr
  MOD_RES (8)..(8): Ala, Asp, Ser or Tyr
  MOD_RES (9)..(9): Phe, Ile, Leu or Met
CARXXXYXXDYWGQ

SEQ ID NO: 84 - protein, 14 aa, Artificial Sequence
  Description of Artificial Sequence: Synthetic peptide
  MOD_RES (4)..(5): Ser or Tyr
  MOD_RES (8)..(8): Ala, Asp, Ser or Tyr
  MOD_RES (9)..(9): Phe, Ile, Leu or Met
CARXXGYXXDYWGQ

SEQ ID NO: 85 - protein, 14 aa, Artificial Sequence
  Description of Artificial Sequence: Synthetic peptide
  MOD_RES (4)..(4): Asp, Gly, His or Arg
  MOD_RES (5)..(5): Ser or Tyr
  MOD_RES (8)..(8): Ala, Asp, Ser or Tyr
  MOD_RES (9)..(9): Phe, Ile, Leu or Met
CARXXGYXXDYWGQ

SEQ ID NO: 86 - protein, 14 aa, Artificial Sequence
  Description of Artificial Sequence: Synthetic peptide
  MOD_RES (4)..(4): Ser or Tyr
  MOD_RES (5)..(5): Asp, Gly, His or Arg
  MOD_RES (8)..(8): Ala, Asp, Ser or Tyr
  MOD_RES (9)..(9): Phe, Ile, Leu or Met
CARXXGYXXDYWGQ

SEQ ID NO: 87 - protein, 14 aa, Artificial Sequence
  Description of Artificial Sequence: Synthetic peptide
  MOD_RES (4)..(5): Asp, Gly, His or Arg
  MOD_RES (8)..(8): Ala, Asp, Ser or Tyr
  MOD_RES (9)..(9): Phe, Ile, Leu or Met
CARXXGYXXDYWGQ

SEQ ID NO: 88 - protein, 14 aa, Artificial Sequence
  Description of Artificial Sequence: Synthetic peptide
  MOD_RES (4)..(6): Ser or Tyr
  MOD_RES (7)..(7): Asp or Gly
  MOD_RES (8)..(8): Ala, Asp, Ser or Tyr
  MOD_RES (9)..(9): Phe, Ile, Leu or Met
CARXXXXXXDYWGQ

SEQ ID NO: 89 - protein, 14 aa, Artificial Sequence
  Description of Artificial Sequence: Synthetic peptide
  MOD_RES (4)..(4): Asp, Glu or Tyr
  MOD_RES (6)..(7): Ser or Tyr
  MOD_RES (8)..(8): Ala, Asp, His, Pro, Ser or Tyr
  MOD_RES (10)..(10): Ala or Asp
CARXYXXXFXYWGQ

SEQ ID NO: 90 - protein, 14 aa, Artificial Sequence
  Description of Artificial Sequence: Synthetic peptide
  MOD_RES (4)..(4): Asp, Glu or Tyr
  MOD_RES (5)..(5): Asp or Gly
  MOD_RES (6)..(7): Ser or Tyr
  MOD_RES (8)..(8): Ala, Asp, His, Pro, Ser or Tyr
  MOD_RES (10)..(10): Ala or Asp
CARXXXXXFXYWGQ

SEQ ID NO: 91 - protein, 14 aa, Artificial Sequence
  Description of Artificial Sequence: Synthetic peptide
  MOD_RES (4)..(4): Asp, Glu or Tyr
  MOD_RES (7)..(7): Ser or Tyr
  MOD_RES (8)..(8): Ala, Asp, His, Pro, Ser or Tyr
  MOD_RES (10)..(10): Ala or Asp
CARXYGXXFXYWGQ

SEQ ID NO: 92 - protein, 14 aa, Artificial Sequence
  Description of Artificial Sequence: Synthetic peptide
  MOD_RES (4)..(4): Asp, Glu or Tyr
  MOD_RES (5)..(5): Asp or Gly
  MOD_RES (7)..(7): Ser or Tyr
  MOD_RES (8)..(8): Ala, Asp, His, Pro, Ser or Tyr
  MOD_RES (10)..(10): Ala or Asp
CARXXGXXFXYWGQ

SEQ ID NO: 93 - protein, 14 aa, Artificial Sequence
  Description of Artificial Sequence: Synthetic peptide
  MOD_RES (4)..(4): Asp, Glu or Tyr
  MOD_RES (6)..(6): Ser or Tyr
  MOD_RES (7)..(7): Asp, Gly, Asn or Ser
  MOD_RES (8)..(8): Ala, Asp, His, Pro, Ser or Tyr
  MOD_RES (10)..(10): Ala or Asp
CARXYXXXFXYWGQ

SEQ ID NO: 94 - protein, 14 aa, Artificial Sequence
  Description of Artificial Sequence: Synthetic peptide
  MOD_RES (4)..(4): Asp, Glu or Tyr
  MOD_RES (5)..(5): Asp or Gly
  MOD_RES (6)..(6): Ser or Tyr
  MOD_RES (7)..(7): Asp, Gly, Asn or Ser
  MOD_RES (8)..(8): Ala, Asp, His, Pro, Ser or Tyr
  MOD_RES (10)..(10): Ala or Asp
CARXXXXXFXYWGQ

SEQ ID NO: 95 - protein, 14 aa, Artificial Sequence
  Description of Artificial Sequence: Synthetic peptide
  MOD_RES (4)..(4): Asp, Glu or Tyr
  MOD_RES (7)..(7): Asp, Gly, Asn or Ser
  MOD_RES (8)..(8): Ala, Asp, His, Pro, Ser or Tyr
  MOD_RES (10)..(10): Ala or Asp
CARXYGXXFXYWGQ

SEQ ID NO: 96 - protein, 14 aa, Artificial Sequence
  Description of Artificial Sequence: Synthetic peptide
  MOD_RES (4)..(4): Asp, Glu or Tyr
  MOD_RES (5)..(5): Asp or Gly
  MOD_RES (7)..(7): Asp, Gly, Asn or Ser
  MOD_RES (8)..(8): Ala, Asp, His, Pro, Ser or Tyr
  MOD_RES (10)..(10): Ala or Asp
CARXXGXXFXYWGQ

SEQ ID NO: 97 - protein, 14 aa, Artificial Sequence
  Description of Artificial Sequence: Synthetic peptide
  MOD_RES (4)..(4): Asp, Phe, His, Leu, Val or Tyr
  MOD_RES (6)..(7): Ser or Tyr
  MOD_RES (8)..(8): Ala, Asp, Phe, Ser, Val or Tyr
  MOD_RES (9)..(9): Phe, Ile, Leu or Met
CARXYXXXXDYWGQ

SEQ ID NO: 98 - protein, 14 aa, Artificial Sequence
  Description of Artificial Sequence: Synthetic peptide
  MOD_RES (4)..(4): Asp, Phe, His, Leu, Val or Tyr
  MOD_RES (5)..(5): Gly or Arg
  MOD_RES (6)..(7): Ser or Tyr
  MOD_RES (8)..(8): Ala, Asp, Phe, Ser, Val or Tyr
  MOD_RES (9)..(9): Phe, Ile, Leu or Met
CARXXXXXXDYWGQ

SEQ ID NO: 99 - protein, 14 aa, Artificial Sequence
  Description of Artificial Sequence: Synthetic peptide
  MOD_RES (4)..(4): Asp, Phe, His, Leu, Val or Tyr
  MOD_RES (7)..(7): Ser or Tyr
  MOD_RES (8)..(8): Ala, Asp, Phe, Ser, Val or Tyr
  MOD_RES (9)..(9): Phe, Ile, Leu or Met
CARXYGXXXDYWGQ

SEQ ID NO: 100 - protein, 14 aa, Artificial Sequence
  Description of Artificial Sequence: Synthetic peptide
  MOD_RES (4)..(4): Asp, Phe, His, Leu, Val or Tyr
  MOD_RES (5)..(5): Gly or Arg
  MOD_RES (7)..(7): Ser or Tyr
  MOD_RES (8)..(8): Ala, Asp, Phe, Ser, Val or Tyr
  MOD_RES (9)..(9): Phe, Ile, Leu or Met
CARXXGXXXDYWGQ

SEQ ID NO: 101 - protein, 14 aa, Artificial Sequence
  Description of Artificial Sequence: Synthetic peptide
  MOD_RES (4)..(4): Asp, Phe, His, Leu, Val or Tyr
  MOD_RES (6)..(6): Ser or Tyr
  MOD_RES (7)..(7): Asp, Gly, Asn or Ser
  MOD_RES (8)..(8): Ala, Asp, Phe, Ser, Val or Tyr
  MOD_RES (9)..(9): Phe, Ile, Leu or Met
CARXYXXXXDYWGQ

SEQ ID NO: 102 - protein, 14 aa, Artificial Sequence
  Description of Artificial Sequence: Synthetic peptide
  MOD_RES (4)..(4): Asp, Phe, His, Leu, Val or Tyr
  MOD_RES (5)..(5): Gly or Arg
  MOD_RES (6)..(6): Ser or Tyr
  MOD_RES (7)..(7): Asp, Gly, Asn or Ser
  MOD_RES (8)..(8): Ala, Asp, Phe, Ser, Val or Tyr
  MOD_RES (9)..(9): Phe, Ile, Leu or Met
CARXXXXXXDYWGQ

SEQ ID NO: 103 - protein, 14 aa, Artificial Sequence
  Description of Artificial Sequence: Synthetic peptide
  MOD_RES (4)..(4): Asp, Phe, His, Leu, Val or Tyr
  MOD_RES (7)..(7): Asp, Gly, Asn or Ser
  MOD_RES (8)..(8): Ala, Asp, Phe, Ser, Val or Tyr
  MOD_RES (9)..(9): Phe, Ile, Leu or Met
CARXYGXXXDYWGQ

SEQ ID NO: 104 - protein, 14 aa, Artificial Sequence
  Description of Artificial Sequence: Synthetic peptide
  MOD_RES (4)..(4): Asp, Phe, His, Leu, Val or Tyr
  MOD_RES (5)..(5): Gly or Arg
  MOD_RES (7)..(7): Asp, Gly, Asn or Ser
  MOD_RES (8)..(8): Ala, Asp, Phe, Ser, Val or Tyr
  MOD_RES (9)..(9): Phe, Ile, Leu or Met
CARXXGXXXDYWGQ

SEQ ID NO: 105 - protein, 14 aa, Artificial Sequence
  Description of Artificial Sequence: Synthetic peptide
  MOD_RES (8)..(8): Leu, Met, Pro or Thr
CERYDSPXGDYWGQ

SEQ ID NO: 106 - protein, 15 aa, Artificial Sequence
  Description of Artificial Sequence: Synthetic peptide
  MOD_RES (4)..(4): Asp or Gly
  MOD_RES (9)..(9): Ala, Asp, Ser or Tyr
  MOD_RES (10)..(10): Phe, Ile, Leu or Met
  MOD_RES (11)..(11): Ala or Asp
  MOD_RES (12)..(12): Asp, Phe, Val or Tyr
CARXYYGYXXXXWGQ

SEQ ID NO: 107 - protein, 15 aa, Artificial Sequence
  Description of Artificial Sequence: Synthetic peptide
  MOD_RES (9)..(9): Ala, Asp, Ser or Tyr
  MOD_RES (10)..(10): Phe, Ile, Leu or Met
  MOD_RES (11)..(11): Ala or Asp
  MOD_RES (12)..(12): Asp, Phe, Val or Tyr
CARYGYGYXXXXWGQ

SEQ ID NO: 108 - protein, 15 aa, Artificial Sequence
  Description of Artificial Sequence: Synthetic peptide
  MOD_RES (4)..(4): Asp or Gly
  MOD_RES (9)..(9): Ala, Asp, Ser or Tyr
  MOD_RES (10)..(10): Phe, Ile, Leu or Met
  MOD_RES (11)..(11): Ala or Asp
  MOD_RES (12)..(12): Asp, Phe, Val or Tyr
CARXGYGYXXXXWGQ

SEQ ID NO: 109 - protein, 15 aa, Artificial Sequence
  Description of Artificial Sequence: Synthetic peptide
  MOD_RES (9)..(9): Ala, Asp, Ser or Tyr
  MOD_RES (10)..(10): Phe, Ile, Leu or Met
  MOD_RES (11)..(11): Ala or Asp
  MOD_RES (12)..(12): Asp, Phe, Val or Tyr
CARYYGGYXXXXWGQ

SEQ ID NO: 110 - protein, 15 aa, Artificial Sequence
  Description of Artificial Sequence: Synthetic peptide
  MOD_RES (4)..(4): Asp or Gly
  MOD_RES (9)..(9): Ala, Asp, Ser or Tyr
  MOD_RES (10)..(10): Phe, Ile, Leu or Met
  MOD_RES (11)..(11): Ala or Asp
  MOD_RES (12)..(12): Asp, Phe, Val or Tyr
CARXYGGYXXXXWGQ

SEQ ID NO: 111 - protein, 15 aa, Artificial Sequence
  Description of Artificial Sequence: Synthetic peptide
  MOD_RES (9)..(9): Ala, Asp, Ser or Tyr
  MOD_RES (10)..(10): Phe, Ile, Leu or Met
  MOD_RES (11)..(11): Ala or Asp
  MOD_RES (12)..(12): Asp, Phe, Val or Tyr
CARYGGGYXXXXWGQ

SEQ ID NO: 112 - protein, 15 aa, Artificial Sequence
  Description of Artificial Sequence: Synthetic peptide
  MOD_RES (4)..(4): Asp or Gly
  MOD_RES (9)..(9): Ala, Asp, Ser or Tyr
  MOD_RES (10)..(10): Phe, Ile, Leu or Met
  MOD_RES (11)..(11): Ala or Asp
  MOD_RES (12)..(12): Asp, Phe, Val or Tyr
CARXGGGYXXXXWGQ

SEQ ID NO: 113 - protein, 15 aa, Artificial Sequence
  Description of Artificial Sequence: Synthetic peptide
  MOD_RES (9)..(9): Ala, Asp, Ser or Tyr
  MOD_RES (10)..(10): Phe, Ile, Leu or Met
  MOD_RES (11)..(11): Ala or Asp
  MOD_RES (12)..(12): Asp, Phe, Val or Tyr
CARYYYYGXXXXWGQ

SEQ ID NO: 114 - protein, 15 aa, Artificial Sequence
  Description of Artificial Sequence: Synthetic peptide
  MOD_RES (4)..(4): Asp or Gly
  MOD_RES (9)..(9): Ala, Asp, Ser or Tyr
  MOD_RES (10)..(10): Phe, Ile, Leu or Met
  MOD_RES (11)..(11): Ala or Asp
  MOD_RES (12)..(12): Asp, Phe, Val or Tyr
CARXYYYGXXXXWGQ

SEQ ID NO: 115 - protein, 15 aa, Artificial Sequence
  Description of Artificial Sequence: Synthetic peptide
  MOD_RES (9)..(9): Ala, Asp, Ser or Tyr
  MOD_RES (10)..(10): Phe, Ile, Leu or Met
  MOD_RES (11)..(11): Ala or Asp
  MOD_RES (12)..(12): Asp, Phe, Val or Tyr
CARYGYYGXXXXWGQ

SEQ ID NO: 116 - protein, 15 aa, Artificial Sequence
  Description of Artificial Sequence: Synthetic peptide
  MOD_RES (9)..(9): Ala, Asp, Ser or Tyr
  MOD_RES (10)..(10): Phe, Ile, Leu or Met
  MOD_RES (11)..(11): Ala or Asp
  MOD_RES (12)..(12): Asp, Phe, Val or Tyr
CARYYYYYXXXXWGQ

SEQ ID NO: 117 - protein, 15 aa, Artificial Sequence
  Description of Artificial Sequence: Synthetic peptide
  MOD_RES (4)..(4): Asp or Gly
  MOD_RES (9)..(9): Ala, Asp, Ser or Tyr
  MOD_RES (10)..(10): Phe, Ile, Leu or Met
  MOD_RES (11)..(11): Ala or Asp
  MOD_RES (12)..(12): Asp, Phe, Val or Tyr
CARXGYYGXXXXWGQ

SEQ ID NO: 118 - protein, 15 aa, Artificial Sequence
  Description of Artificial Sequence: Synthetic peptide
  MOD_RES (9)..(9): Ala, Asp, Ser or Tyr
  MOD_RES (10)..(10): Phe, Ile, Leu or Met
  MOD_RES (11)..(11): Ala or Asp
  MOD_RES (12)..(12): Asp, Phe, Val or Tyr
CARYYGYGXXXXWGQ

SEQ ID NO: 119 - protein, 15 aa, Artificial Sequence
  Description of Artificial Sequence: Synthetic peptide
  MOD_RES (4)..(4): Asp or Gly
  MOD_RES (9)..(9): Ala, Asp, Ser or Tyr
  MOD_RES (10)..(10): Phe, Ile, Leu or Met
  MOD_RES (11)..(11): Ala or Asp
  MOD_RES (12)..(12): Asp, Phe, Val or Tyr
CARXYGYGXXXXWGQ

SEQ ID NO: 120 - protein, 15 aa, Artificial Sequence
  Description of Artificial Sequence: Synthetic peptide
  MOD_RES (9)..(9): Ala, Asp, Ser or Tyr
  MOD_RES (10)..(10): Phe, Ile, Leu or Met
  MOD_RES (11)..(11): Ala or Asp
  MOD_RES (12)..(12): Asp, Phe, Val or Tyr
CARYGGYGXXXXWGQ

SEQ ID NO: 121 - protein, 15 aa, Artificial Sequence
  Description of Artificial Sequence: Synthetic peptide
  MOD_RES (4)..(4): Asp or Gly
  MOD_RES (9)..(9): Ala, Asp, Ser or Tyr
  MOD_RES (10)..(10): Phe, Ile, Leu or Met
  MOD_RES (11)..(11): Ala or Asp
  MOD_RES (12)..(12): Asp, Phe, Val or Tyr
CARXGGYGXXXXWGQ

SEQ ID NO: 122 - protein, 15 aa, Artificial Sequence
  Description of Artificial Sequence: Synthetic peptide
  MOD_RES (9)..(9): Ala, Asp, Ser or Tyr
  MOD_RES (10)..(10): Phe, Ile, Leu or Met
  MOD_RES (11)..(11): Ala or Asp
  MOD_RES (12)..(12): Asp, Phe, Val or Tyr
CARYYYGGXXXXWGQ

SEQ ID NO: 123 - protein, 15 aa, Artificial Sequence
  Description of Artificial Sequence: Synthetic peptide
  MOD_RES (4)..(4): Asp or Gly
  MOD_RES (9)..(9): Ala, Asp, Ser or Tyr
  MOD_RES (10)..(10): Phe, Ile, Leu or Met
  MOD_RES (11)..(11): Ala or Asp
  MOD_RES (12)..(12): Asp, Phe, Val or Tyr
CARXYYGGXXXXWGQ

SEQ ID NO: 124 - protein, 15 aa, Artificial Sequence
  Description of Artificial Sequence: Synthetic peptide
  MOD_RES (9)..(9): Ala, Asp, Ser or Tyr
  MOD_RES (10)..(10): Phe, Ile, Leu or Met
  MOD_RES (11)..(11): Ala or Asp
  MOD_RES (12)..(12): Asp, Phe, Val or Tyr
CARYGYGGXXXXWGQ

SEQ ID NO: 125 - protein, 15 aa, Artificial Sequence
  Description of Artificial Sequence: Synthetic peptide
  MOD_RES (4)..(4): Asp or Gly
  MOD_RES (9)..(9): Ala, Asp, Ser or Tyr
  MOD_RES (10)..(10): Phe, Ile, Leu or Met
  MOD_RES (11)..(11): Ala or Asp
  MOD_RES (12)..(12): Asp, Phe, Val or Tyr
CARXGYGGXXXXWGQ

SEQ ID NO: 126 - protein, 15 aa, Artificial Sequence
  Description of Artificial Sequence: Synthetic peptide
  MOD_RES (9)..(9): Ala, Asp, Ser or Tyr
  MOD_RES (10)..(10): Phe, Ile, Leu or Met
  MOD_RES (11)..(11): Ala or Asp
  MOD_RES (12)..(12): Asp, Phe, Val or Tyr
CARYYGGGXXXXWGQ

SEQ ID NO: 127 - protein, 15 aa, Artificial Sequence
  Description of Artificial Sequence: Synthetic peptide
  MOD_RES (4)..(4): Asp or Gly
  MOD_RES (9)..(9): Ala, Asp, Ser or Tyr
  MOD_RES (10)..(10): Phe, Ile, Leu or Met
  MOD_RES (11)..(11): Ala or Asp
  MOD_RES (12)..(12): Asp, Phe, Val or Tyr
CARXYYYYXXXXWGQ

SEQ ID NO: 128 - protein, 15 aa, Artificial Sequence
  Description of Artificial Sequence: Synthetic peptide
  MOD_RES (4)..(4): Asp or Gly
  MOD_RES (9)..(9): Ala, Asp, Ser or Tyr
  MOD_RES (10)..(10): Phe, Ile, Leu or Met
  MOD_RES (11)..(11): Ala or Asp
  MOD_RES (12)..(12): Asp, Phe, Val or Tyr
CARXYGGGXXXXWGQ

SEQ ID NO: 129 - protein, 15 aa, Artificial Sequence
  Description of Artificial Sequence: Synthetic peptide
  MOD_RES (9)..(9): Ala, Asp, Ser or Tyr
  MOD_RES (10)..(10): Phe, Ile, Leu or Met
  MOD_RES (11)..(11): Ala or Asp
  MOD_RES (12)..(12): Asp, Phe, Val or Tyr
CARYGGGGXXXXWGQ

SEQ ID NO: 130 - protein, 15 aa, Artificial Sequence
  Description of Artificial Sequence: Synthetic peptide
  MOD_RES (4)..(4): Asp or Gly
  MOD_RES (9)..(9): Ala, Asp, Ser or Tyr
  MOD_RES (10)..(10): Phe, Ile, Leu or Met
  MOD_RES (11)..(11): Ala or Asp
  MOD_RES (12)..(12): Asp, Phe, Val or Tyr
CARXGGGGXXXXWGQ

SEQ ID NO: 131 - protein, 15 aa, Artificial Sequence
  Description of Artificial Sequence: Synthetic peptide
  MOD_RES (9)..(9): Ala, Asp, Ser or Tyr
  MOD_RES (10)..(10): Phe, Ile, Leu or Met
  MOD_RES (11)..(11): Ala or Asp
  MOD_RES (12)..(12): Asp, Phe, Val or Tyr
CARYGYYYXXXXWGQ

SEQ ID NO: 132 - protein, 15 aa, Artificial Sequence
  Description of Artificial Sequence: Synthetic peptide
  MOD_RES (4)..(4): Asp or Gly
  MOD_RES (9)..(9): Ala, Asp, Ser or Tyr
  MOD_RES (10)..(10): Phe, Ile, Leu or Met
  MOD_RES (11)..(11): Ala or Asp
  MOD_RES (12)..(12): Asp, Phe, Val or Tyr
CARXGYYYXXXXWGQ

SEQ ID NO: 133 - protein, 15 aa, Artificial Sequence
  Description of Artificial Sequence: Synthetic peptide
  MOD_RES (9)..(9): Ala, Asp, Ser or Tyr
  MOD_RES (10)..(10): Phe, Ile, Leu or Met
  MOD_RES (11)..(11): Ala or Asp
  MOD_RES (12)..(12): Asp, Phe, Val or Tyr
CARYYGYYXXXXWGQ

SEQ ID NO: 134 - protein, 15 aa, Artificial Sequence
  Description of Artificial Sequence: Synthetic peptide
  MOD_RES (4)..(4): Asp or Gly
  MOD_RES (9)..(9): Ala, Asp, Ser or Tyr
  MOD_RES (10)..(10): Phe, Ile, Leu or Met
  MOD_RES (11)..(11): Ala or Asp
  MOD_RES (12)..(12): Asp, Phe, Val or Tyr
CARXYGYYXXXXWGQ

SEQ ID NO: 135 - protein, 15 aa, Artificial Sequence
  Description of Artificial Sequence: Synthetic peptide
  MOD_RES (9)..(9): Ala, Asp, Ser or Tyr
  MOD_RES (10)..(10): Phe, Ile, Leu or Met
  MOD_RES (11)..(11): Ala or Asp
  MOD_RES (12)..(12): Asp, Phe, Val or Tyr
CARYGGYYXXXXWGQ

SEQ ID NO: 136 - protein, 15 aa, Artificial Sequence
  Description of Artificial Sequence: Synthetic peptide
  MOD_RES (4)..(4): Asp or Gly
  MOD_RES (9)..(9): Ala, Asp, Ser or Tyr
  MOD_RES (10)..(10): Phe, Ile, Leu or Met
  MOD_RES (11)..(11): Ala or Asp
  MOD_RES (12)..(12): Asp, Phe, Val or Tyr
CARXGGYYXXXXWGQ

SEQ ID NO: 137 - protein, 15 aa, Artificial Sequence
  Description of Artificial Sequence: Synthetic peptide
  MOD_RES (9)..(9): Ala, Asp, Ser or Tyr
  MOD_RES (10)..(10): Phe, Ile, Leu or Met
  MOD_RES (11)..(11): Ala or Asp
  MOD_RES (12)..(12): Asp, Phe, Val or Tyr
CARYYYGYXXXXWGQ

SEQ ID NO: 138 - protein, 15 aa, Artificial Sequence
  Description of Artificial Sequence: Synthetic peptide
  MOD_RES (4)..(4): Asp, Glu or Tyr
  MOD_RES (5)..(5): Asp, Gly, His or Arg
  MOD_RES (6)..(6): Ser or Tyr
  MOD_RES (8)..(8): Ser or Tyr
  MOD_RES (9)..(9): Ala or Gly
  MOD_RES (10)..(10): Phe, Ile, Leu or Met
CARXXXYXXXDYWGQ

SEQ ID NO: 139 - protein, 15 aa, Artificial Sequence
  Description of Artificial Sequence: Synthetic peptide
  MOD_RES (4)..(4): Asp, Glu or Tyr
  MOD_RES (8)..(8): Ser or Tyr
  MOD_RES (9)..(9): Ala or Gly
  MOD_RES (10)..(10): Phe, Ile, Leu or Met
CARXYGYXXXDYWGQ

SEQ ID NO: 140 - protein, 15 aa, Artificial Sequence
  Description of Artificial Sequence: Synthetic peptide
  MOD_RES (4)..(4): Asp, Glu or Tyr
  MOD_RES (5)..(5): Asp, Gly, His or Arg
  MOD_RES (8)..(8): Ser or Tyr
  MOD_RES (9)..(9): Ala or Gly
  MOD_RES (10)..(10): Phe, Ile, Leu or Met
CARXXGYXXXDYWGQ

SEQ ID NO: 141 - protein, 15 aa, Artificial Sequence
  Description of Artificial Sequence: Synthetic peptide
  MOD_RES (4)..(4): Asp, Glu or Tyr
  MOD_RES (6)..(6): Ser or Tyr
  MOD_RES (7)..(7): Asp or Gly
  MOD_RES (8)..(8): Ser or Tyr
  MOD_RES (9)..(9): Ala or Gly
  MOD_RES (10)..(10): Phe, Ile, Leu or Met
CARXYXXXXXDYWGQ

SEQ ID NO: 142 - protein, 15 aa, Artificial Sequence
  Description of Artificial Sequence: Synthetic peptide
  MOD_RES (4)..(4): Asp, Glu or Tyr
  MOD_RES (5)..(5): Asp, Gly, His or Arg
  MOD_RES (6)..(6): Ser or Tyr
  MOD_RES (7)..(7): Asp or Gly
  MOD_RES (8)..(8): Ser or Tyr
  MOD_RES (9)..(9): Ala or Gly
  MOD_RES (10)..(10): Phe, Ile, Leu or Met
CARXXXXXXXDYWGQ

SEQ ID NO: 143 - protein, 15 aa, Artificial Sequence
  Description of Artificial Sequence: Synthetic peptide
  MOD_RES (4)..(4): Asp, Glu or Tyr
  MOD_RES (7)..(7): Asp or Gly
  MOD_RES (8)..(8): Ser or Tyr
  MOD_RES (9)..(9): Ala or Gly
  MOD_RES (10)..(10): Phe, Ile, Leu or Met
CARXYGXXXXDYWGQ

SEQ ID NO: 144 - protein, 15 aa, Artificial Sequence
  Description of Artificial Sequence: Synthetic peptide
  MOD_RES (4)..(4): Asp, Glu or Tyr
  MOD_RES (5)..(5): Asp, Gly, His or Arg
  MOD_RES (7)..(7): Asp or Gly
  MOD_RES (8)..(8): Ser or Tyr
  MOD_RES (9)..(9): Ala or Gly
  MOD_RES (10)..(10): Phe, Ile, Leu or Met
CARXXGXXXXDYWGQ

SEQ ID NO: 145 - protein, 15 aa, Artificial Sequence
  Description of Artificial Sequence: Synthetic peptide
  MOD_RES (4)..(4): Asp, Glu or Tyr
  MOD_RES (6)..(6): Ser or Tyr
  MOD_RES (8)..(8): Ser or Tyr
  MOD_RES (10)..(10): Phe, Ile, Leu or Met
CARXYXYXYXDYWGQ

SEQ ID NO: 146 - protein, 15 aa, Artificial Sequence
  Description of Artificial Sequence: Synthetic peptide
  MOD_RES (4)..(4): Asp, Glu or Tyr
  MOD_RES (5)..(5): Asp, Gly, His or Arg
  MOD_RES (6)..(6): Ser or Tyr
  MOD_RES (8)..(8): Ser or Tyr
  MOD_RES (10)..(10): Phe, Ile, Leu or Met
CARXXXYXYXDYWGQ

SEQ ID NO: 147 - protein, 15 aa, Artificial Sequence
  Description of Artificial Sequence: Synthetic peptide
  MOD_RES (4)..(4): Asp, Glu or Tyr
  MOD_RES (8)..(8): Ser or Tyr
  MOD_RES (10)..(10): Phe, Ile, Leu or Met
CARXYGYXYXDYWGQ

SEQ ID NO: 148 - protein, 15 aa, Artificial Sequence
  Description of Artificial Sequence: Synthetic peptide
  MOD_RES (4)..(4): Asp, Glu or Tyr
  MOD_RES (5)..(5): Asp, Gly, His or Arg
  MOD_RES (8)..(8): Ser or Tyr
  MOD_RES (10)..(10): Phe, Ile, Leu or Met
CARXXGYXYXDYWGQ

SEQ ID NO: 149 - protein, 15 aa, Artificial Sequence
  Description of Artificial Sequence: Synthetic peptide
  MOD_RES (4)..(4): Asp, Glu or Tyr
  MOD_RES (6)..(6): Ser or Tyr
  MOD_RES (7)..(7): Asp or Gly
  MOD_RES (8)..(8): Ser or Tyr
  MOD_RES (10)..(10): Phe, Ile, Leu or Met
CARXYXXXYXDYWGQ

SEQ ID NO: 150 - protein, 15 aa, Artificial Sequence
  Description of Artificial Sequence: Synthetic peptide
  MOD_RES (4)..(4): Asp, Glu or Tyr
  MOD_RES (5)..(5): Asp, Gly, His or Arg
  MOD_RES (6)..(6): Ser or Tyr
  MOD_RES (7)..(7): Asp or Gly
  MOD_RES (8)..(8): Ser or Tyr
  MOD_RES (10)..(10): Phe, Ile, Leu or Met
CARXXXXXYXDYWGQ

SEQ ID NO: 151 - protein, 15 aa, Artificial Sequence
  Description of Artificial Sequence: Synthetic peptide
  MOD_RES (4)..(4): Asp, Glu or Tyr
  MOD_RES (7)..(7): Asp or Gly
  MOD_RES (8)..(8): Ser or Tyr
  MOD_RES (10)..(10): Phe, Ile, Leu or Met
CARXYGXXYXDYWGQ

SEQ ID NO: 152 - protein, 15 aa, Artificial Sequence
  Description of Artificial Sequence: Synthetic peptide
  MOD_RES (4)..(4): Asp, Glu or Tyr
  MOD_RES (5)..(5): Asp, Gly, His or Arg
  MOD_RES (7)..(7): Asp or Gly
  MOD_RES (8)..(8): Ser or Tyr
  MOD_RES (10)..(10): Phe, Ile, Leu or Met
CARXXGXXYXDYWGQ

SEQ ID NO: 153 - protein, 15 aa, Artificial Sequence
  Description of Artificial Sequence: Synthetic peptide
  MOD_RES (4)..(4): Asp, Glu or Tyr
  MOD_RES (6)..(6): Ser or Tyr
  MOD_RES (8)..(8): Ser or Tyr
  MOD_RES (9)..(9): Ala or Gly
  MOD_RES (10)..(10): Phe, Ile, Leu or Met
CARXYXYXXXDYWGQ

SEQ ID NO: 154 - protein, 15 aa, Artificial Sequence
  Description of Artificial Sequence: Synthetic peptide
  MOD_RES (4)..(4): His, Pro, Ser or Tyr
  MOD_RES (5)..(5): Ala, Asp, Gly, Asn, Ser or Thr
  MOD_RES (6)..(6): Asp or Gly
  MOD_RES (8)..(8): Ala, Gly, Ser or Thr
  MOD_RES (11)..(11): Ala or Asp
CARXXXYXYFXYWGQ

SEQ ID NO: 155 - protein, 15 aa, Artificial Sequence
  Description of Artificial Sequence: Synthetic peptide
  MOD_RES (5)..(5): Ala, Asp, Gly, Asn, Ser or Thr
  MOD_RES (6)..(6): Asp or Gly
  MOD_RES (8)..(8): Ala, Gly, Ser or Thr
  MOD_RES (11)..(11): Ala or Asp
CARRXXYXYFXYWGQ

SEQ ID NO: 156 - protein, 15 aa, Artificial Sequence
  Description of Artificial Sequence: Synthetic peptide
  MOD_RES (4)..(4): His, Pro, Ser or Tyr
  MOD_RES (5)..(5): Ala, Asp, Gly, Asn, Ser or Thr
  MOD_RES (6)..(6): Asp or Gly
  MOD_RES (8)..(8): Ala, Gly, Ser or Thr
  MOD_RES (11)..(11): Ala or Asp
CARXXXRXYFXYWGQ

SEQ ID NO: 157 - protein, 15 aa, Artificial Sequence
  Description of Artificial Sequence: Synthetic peptide
  MOD_RES (5)..(5): Ala, Asp, Gly, Asn, Ser or Thr
  MOD_RES (6)..(6): Asp or Gly
  MOD_RES (8)..(8): Ala, Gly, Ser or Thr
  MOD_RES (11)..(11): Ala or Asp
CARRXXRXYFXYWGQ

SEQ ID NO: 158 - protein, 15 aa, Artificial Sequence
  Description of Artificial Sequence: Synthetic peptide
  MOD_RES (4)..(4): His, Pro, Ser or Tyr
  MOD_RES (5)..(5): Ala, Asp, Gly, Asn, Ser or Thr
  MOD_RES (6)..(6): Asp or Gly
  MOD_RES (8)..(8): Ala, Gly, Ser or Thr
  MOD_RES (11)..(11): Ala or Asp
CARXXXYXWFXYWGQ

SEQ ID NO: 159 - protein, 15 aa, Artificial Sequence
  Description of Artificial Sequence: Synthetic peptide
  MOD_RES (5)..(5): Ala, Asp, Gly, Asn, Ser or Thr
  MOD_RES (6)..(6): Asp or Gly
  MOD_RES (8)..(8): Ala, Gly, Ser or Thr
  MOD_RES (11)..(11): Ala or Asp
CARRXXYXWFXYWGQ

SEQ ID NO: 160 - protein, 15 aa, Artificial Sequence
  Description of Artificial Sequence: Synthetic peptide
  MOD_RES (4)..(4): His, Pro, Ser or Tyr
  MOD_RES (5)..(5): Ala, Asp, Gly, Asn, Ser or Thr
  MOD_RES (6)..(6): Asp or Gly
  MOD_RES (8)..(8): Ala, Gly, Ser or Thr
  MOD_RES (11)..(11): Ala or Asp
CARXXXRXWFXYWGQ

SEQ ID NO: 161 - protein, 15 aa, Artificial Sequence
  Description of Artificial Sequence: Synthetic peptide
  MOD_RES (5)..(5): Ala, Asp, Gly, Asn, Ser or Thr
  MOD_RES (6)..(6): Asp or Gly
  MOD_RES (8)..(8): Ala, Gly, Ser or Thr
  MOD_RES (11)..(11): Ala or Asp
CARRXXRXWFXYWGQ

SEQ ID NO: 162 - protein, 15 aa, Artificial Sequence
  Description of Artificial Sequence: Synthetic peptide
  MOD_RES (4)..(4): Ala, Asp, His, Pro, Ser or Tyr
  MOD_RES (5)..(5): Asp, Gly, His or Arg
  MOD_RES (7)..(7): Ser or Tyr
  MOD_RES (8)..(8): Asn or Tyr
  MOD_RES (9)..(9): Ala, Asp or Gly
  MOD_RES (12)..(12): Asp, Phe, Val or Tyr
CARXXGXXXMDXWGQ

SEQ ID NO: 163 - protein, 15 aa, Artificial Sequence
  Description of Artificial Sequence: Synthetic peptide
  MOD_RES (4)..(4): Ala, Asp, His, Pro, Ser or Tyr
  MOD_RES (5)..(5): Asp, Gly, His or Arg
  MOD_RES (7)..(7): Lys, Asn, Arg or Ser
  MOD_RES (8)..(8): Asn or Tyr
  MOD_RES (9)..(9): Ala, Asp or Gly
  MOD_RES (12)..(12): Asp, Phe, Val or Tyr
CARXXGXXXMDXWGQ

SEQ ID NO: 164 - protein, 15 aa, Artificial Sequence
  Description of Artificial Sequence: Synthetic peptide
  MOD_RES (4)..(4): Ala, Gly, Thr, Asp, Glu, Lys, Asn, Arg or Ser
  MOD_RES (5)..(5): Asp, Gly, Asn or Ser
  MOD_RES (6)..(6): Gly or Arg
  MOD_RES (8)..(8): Ser or Tyr
  MOD_RES (9)..(9): Ala, Asp, His, Pro, Ser or Tyr
CARXXXYXXFDYWGQ

SEQ ID NO: 165 - protein, 15 aa, Artificial Sequence
  Description of Artificial Sequence: Synthetic peptide
  MOD_RES (4)..(4): Ala, Gly, Thr, Asp, Glu, Lys, Asn, Arg or Ser
  MOD_RES (5)..(5): Asp, Gly, Asn or Ser
  MOD_RES (6)..(6): Gly or Arg
  MOD_RES (8)..(8): Ser or Tyr
  MOD_RES (9)..(9): Ala, Asp, His, Pro, Ser or Tyr
CARXXXWXXFDYWGQ

SEQ ID NO: 166 - protein, 15 aa, Artificial Sequence
  Description of Artificial Sequence: Synthetic peptide
  MOD_RES (4)..(4): Ala, Gly, Thr, Asp, Glu, Lys, Asn, Arg or Ser
  MOD_RES (5)..(5): Asp, Gly, Asn or Ser
  MOD_RES (6)..(6): Gly or Arg
  MOD_RES (8)..(8): Asp, Gly, Asn or Ser
  MOD_RES (9)..(9): Ala, Asp, His, Pro, Ser or Tyr
CARXXXYXXFDYWGQ

SEQ ID NO: 167 - protein, 15 aa, Artificial Sequence
  Description of Artificial Sequence: Synthetic peptide
  MOD_RES (4)..(4): Ala, Gly, Thr, Asp, Glu, Lys, Asn, Arg or Ser
  MOD_RES (5)..(5): Asp, Gly, Asn or Ser
  MOD_RES (6)..(6): Gly or Arg
  MOD_RES (8)..(8): Asp, Gly, Asn or Ser
  MOD_RES (9)..(9): Ala, Asp, His, Pro, Ser or Tyr
CARXXXWXXFDYWGQ

SEQ ID NO: 168 - protein, 16 aa, Artificial Sequence
  Description of Artificial Sequence: Synthetic peptide
  MOD_RES (4)..(4): Asp or Gly
  MOD_RES (8)..(8): Ser or Tyr
  MOD_RES (11)..(11): Phe, Ile, Leu or Met
  MOD_RES (13)..(13): Asp, Phe, Val or Tyr
CARXYYGXYYXDXWGQ

SEQ ID NO: 169 - protein, 16 aa, Artificial Sequence
  Description of Artificial Sequence: Synthetic peptide
  MOD_RES (8)..(8): Ser or Tyr
  MOD_RES (11)..(11): Phe, Ile, Leu or Met
  MOD_RES (13)..(13): Asp, Phe, Val or Tyr
CARYGYGXYYXDXWGQ

SEQ ID NO: 170 - protein, 16 aa, Artificial Sequence
  Description of Artificial Sequence: Synthetic peptide
  MOD_RES (4)..(4): Asp or Gly
  MOD_RES (8)..(8): Ser or Tyr
  MOD_RES (11)..(11): Phe, Ile, Leu or Met
  MOD_RES (13)..(13): Asp, Phe, Val or Tyr
CARXGYGXYYXDXWGQ

SEQ ID NO: 171 - protein, 16 aa, Artificial Sequence
  Description of Artificial Sequence: Synthetic peptide
  MOD_RES (8)..(8): Ser or Tyr
  MOD_RES (11)..(11): Phe, Ile, Leu or Met
  MOD_RES (13)..(13): Asp, Phe, Val or Tyr
CARYYGGXYYXDXWGQ

SEQ ID NO: 172 - protein, 16 aa, Artificial Sequence
  Description of Artificial Sequence: Synthetic peptide
  MOD_RES (4)..(4): Asp or Gly
  MOD_RES (8)..(8): Ser or Tyr
  MOD_RES (11)..(11): Phe, Ile, Leu or Met
  MOD_RES (13)..(13): Asp, Phe, Val or Tyr
CARXYGGXYYXDXWGQ

SEQ ID NO: 173 - protein, 16 aa, Artificial Sequence
  Description of Artificial Sequence: Synthetic peptide
  MOD_RES (8)..(8): Ser or Tyr
  MOD_RES (11)..(11): Phe, Ile, Leu or Met
  MOD_RES (13)..(13): Asp, Phe, Val or Tyr
CARYGGGXYYXDXWGQ

SEQ ID NO: 174 - protein, 16 aa, Artificial Sequence
  Description of Artificial Sequence: Synthetic peptide
  MOD_RES (4)..(4): Asp or Gly
  MOD_RES (8)..(8): Ser or Tyr
  MOD_RES (11)..(11): Phe, Ile, Leu or Met
  MOD_RES (13)..(13): Asp, Phe, Val or Tyr
CARXGGGXYYXDXWGQ

SEQ ID NO: 175 - protein, 16 aa, Artificial Sequence
  Description of Artificial Sequence: Synthetic peptide
  MOD_RES (11)..(11): Phe, Ile, Leu or Met
  MOD_RES (13)..(13): Asp, Phe, Val or Tyr
CARYYYYGYYXDXWGQ

SEQ ID NO: 176 - protein, 16 aa, Artificial Sequence
  Description of Artificial Sequence: Synthetic peptide
  MOD_RES (4)..(4): Asp or Gly
  MOD_RES (11)..(11): Phe, Ile, Leu or Met
  MOD_RES (13)..(13): Asp, Phe, Val or Tyr
CARXYYYGYYXDXWGQ

SEQ ID NO: 177 - protein, 16 aa, Artificial Sequence
  Description of Artificial Sequence: Synthetic peptide
  MOD_RES (11)..(11): Phe, Ile, Leu or Met
  MOD_RES (13)..(13): Asp, Phe, Val or Tyr
CARYGYYGYYXDXWGQ

SEQ ID NO: 178 - protein, 16 aa, Artificial Sequence
  Description of Artificial Sequence: Synthetic peptide
  MOD_RES (8)..(8): Ser or Tyr
  MOD_RES (11)..(11): Phe, Ile, Leu or Met
  MOD_RES (13)..(13): Asp, Phe, Val or Tyr
CARYYYYXYYXDXWGQ

SEQ ID NO: 179 - protein, 16 aa, Artificial Sequence
  Description of Artificial Sequence: Synthetic peptide
  MOD_RES (4)..(4): Asp or Gly
  MOD_RES (11)..(11): Phe, Ile, Leu or Met
  MOD_RES (13)..(13): Asp, Phe, Val or Tyr
CARXGYYGYYXDXWGQ

SEQ ID NO: 180 - protein, 16 aa, Artificial Sequence
  Description of Artificial Sequence: Synthetic peptide
  MOD_RES (11)..(11): Phe, Ile, Leu or Met
  MOD_RES (13)..(13): Asp, Phe, Val or Tyr
CARYYGYGYYXDXWGQ

SEQ ID NO: 181 - protein, 16 aa, Artificial Sequence
  Description of Artificial Sequence: Synthetic peptide
  MOD_RES (4)..(4): Asp or Gly
  MOD_RES (11)..(11): Phe, Ile, Leu or Met
  MOD_RES (13)..(13): Asp, Phe, Val or Tyr
CARXYGYGYYXDXWGQ

SEQ ID NO: 182 - protein, 16 aa, Artificial Sequence
  Description of Artificial Sequence: Synthetic peptide
  MOD_RES (11)..(11): Phe, Ile, Leu or Met
  MOD_RES (13)..(13): Asp, Phe, Val or Tyr
CARYGGYGYYXDXWGQ

SEQ ID NO: 183 - protein, 16 aa, Artificial Sequence
  Description of Artificial Sequence: Synthetic peptide
  MOD_RES (4)..(4): Asp or Gly
  MOD_RES (11)..(11): Phe, Ile, Leu or Met
  MOD_RES (13)..(13): Asp, Phe, Val or Tyr
CARXGGYGYYXDXWGQ

SEQ ID NO: 184 - protein, 16 aa, Artificial Sequence
  Description of Artificial Sequence: Synthetic peptide
  MOD_RES (11)..(11): Phe, Ile, Leu or Met
  MOD_RES (13)..(13): Asp, Phe, Val or Tyr
CARYYYGGYYXDXWGQ

SEQ ID NO: 185 - protein, 16 aa, Artificial Sequence
  Description of Artificial Sequence: Synthetic peptide
  MOD_RES (4)..(4): Asp or Gly
  MOD_RES (11)..(11): Phe, Ile, Leu or Met
  MOD_RES (13)..(13): Asp, Phe, Val or Tyr
CARXYYGGYYXDXWGQ

SEQ ID NO: 186 - protein, 16 aa, Artificial Sequence
  Description of Artificial Sequence: Synthetic peptide
  MOD_RES (11)..(11): Phe, Ile, Leu or Met
  MOD_RES (13)..(13): Asp, Phe, Val or Tyr
CARYGYGGYYXDXWGQ

SEQ ID NO: 187 - protein, 16 aa, Artificial Sequence
  Description of Artificial Sequence: Synthetic peptide
  MOD_RES (4)..(4): Asp or Gly
  MOD_RES (11)..(11): Phe, Ile, Leu or Met
  MOD_RES (13)..(13): Asp, Phe, Val or Tyr
CARXGYGGYYXDXWGQ

SEQ ID NO: 188 - protein, 16 aa, Artificial Sequence
  Description of Artificial Sequence: Synthetic peptide
  MOD_RES (11)..(11): Phe, Ile, Leu or Met
  MOD_RES (13)..(13): Asp, Phe, Val or Tyr
CARYYGGGYYXDXWGQ

SEQ ID NO: 189 - protein, 16 aa, Artificial Sequence
  Description of Artificial Sequence: Synthetic peptide
  MOD_RES (4)..(4): Asp or Gly
  MOD_RES (8)..(8): Ser or Tyr
  MOD_RES (11)..(11): Phe, Ile, Leu or Met
  MOD_RES (13)..(13): Asp, Phe, Val or Tyr
CARXYYYXYYXDXWGQ

SEQ ID NO: 190 - protein, 16 aa, Artificial Sequence
  Description of Artificial Sequence: Synthetic peptide
  MOD_RES (4)..(4): Asp or Gly
  MOD_RES (11)..(11): Phe, Ile, Leu or Met
  MOD_RES (13)..(13): Asp, Phe, Val or Tyr
CARXYGGGYYXDXWGQ

SEQ ID NO: 191 - protein, 16 aa, Artificial Sequence
  Description of Artificial Sequence: Synthetic peptide
  MOD_RES (11)..(11): Phe, Ile, Leu or Met
  MOD_RES (13)..(13): Asp, Phe, Val or Tyr
CARYGGGGYYXDXWGQ

SEQ ID NO: 192 - protein, 16 aa, Artificial Sequence
  Description of Artificial Sequence: Synthetic peptide
  MOD_RES (4)..(4): Asp or Gly
  MOD_RES (11)..(11): Phe, Ile, Leu or Met
  MOD_RES (13)..(13): Asp, Phe, Val or Tyr
CARXGGGGYYXDXWGQ

SEQ ID NO: 193 - protein, 16 aa, Artificial Sequence
  Description of Artificial Sequence: Synthetic peptide
  MOD_RES (8)..(8): Ser or Tyr
  MOD_RES (10)..(10): Ala or Gly
  MOD_RES (11)..(11): Phe, Ile, Leu or Met
  MOD_RES (13)..(13): Asp, Phe, Val or Tyr
CARYYYYXYXXDXWGQ

SEQ ID NO: 194 - protein, 16 aa, Artificial Sequence
  Description of Artificial Sequence: Synthetic peptide
  MOD_RES (4)..(4): Asp or Gly
  MOD_RES (8)..(8): Ser or Tyr
  MOD_RES (10)..(10): Ala or Gly
  MOD_RES (11)..(11): Phe, Ile, Leu or Met
  MOD_RES (13)..(13): Asp, Phe, Val or Tyr
CARXYYYXYXXDXWGQ

SEQ ID NO: 195 - protein, 16 aa, Artificial Sequence
  Description of Artificial Sequence: Synthetic peptide
  MOD_RES (8)..(8): Ser or Tyr
  MOD_RES (10)..(10): Ala or Gly
  MOD_RES (11)..(11): Phe, Ile, Leu or Met
  MOD_RES (13)..(13): Asp, Phe, Val or Tyr
CARYGYYXYXXDXWGQ

SEQ ID NO: 196 - protein, 16 aa, Artificial Sequence
  Description of Artificial Sequence: Synthetic peptide
  MOD_RES (4)..(4): Asp or Gly
  MOD_RES (8)..(8): Ser or Tyr
  MOD_RES (10)..(10): Ala or Gly
  MOD_RES (11)..(11): Phe, Ile, Leu or Met
  MOD_RES (13)..(13): Asp, Phe, Val or Tyr
CARXGYYXYXXDXWGQ

SEQ ID NO: 197 - protein, 16 aa, Artificial Sequence
  Description of Artificial Sequence: Synthetic peptide
  MOD_RES (8)..(8): Ser or Tyr
  MOD_RES (10)..(10): Ala or Gly
  MOD_RES (11)..(11): Phe, Ile, Leu or Met
  MOD_RES (13)..(13): Asp, Phe, Val or Tyr
CARYYGYXYXXDXWGQ

SEQ ID NO: 198 - protein, 16 aa, Artificial Sequence
  Description of Artificial Sequence: Synthetic peptide
  MOD_RES (4)..(4): Asp or Gly
  MOD_RES (8)..(8): Ser or Tyr
  MOD_RES (10)..(10): Ala or Gly
  MOD_RES (11)..(11): Phe, Ile, Leu or Met
  MOD_RES (13)..(13): Asp, Phe, Val or Tyr
CARXYGYXYXXDXWGQ

SEQ ID NO: 199 - protein, 16 aa, Artificial Sequence
  Description of Artificial Sequence: Synthetic peptide
  MOD_RES (8)..(8): Ser or Tyr
  MOD_RES (10)..(10): Ala or Gly
  MOD_RES (11)..(11): Phe, Ile, Leu or Met
  MOD_RES (13)..(13): Asp, Phe, Val or Tyr
CARYGGYXYXXDXWGQ

SEQ ID NO: 200 - protein, 16 aa, Artificial Sequence
  Description of Artificial Sequence: Synthetic peptide
  MOD_RES (8)..(8): Ser or Tyr
  MOD_RES (11)..(11): Phe, Ile, Leu or Met
  MOD_RES (13)..(13): Asp, Phe, Val or Tyr
CARYGYYXYYXDXWGQ

SEQ ID NO: 201 - protein, 16 aa, Artificial Sequence
  Description of Artificial Sequence: Synthetic peptide
  MOD_RES (4)..(4): Asp or Gly
  MOD_RES (8)..(8): Ser or Tyr
  MOD_RES (10)..(10): Ala or Gly
  MOD_RES (11)..(11): Phe, Ile, Leu or Met
  MOD_RES (13)..(13): Asp, Phe, Val or Tyr
CARXGGYXYXXDXWGQ

SEQ ID NO: 202 - protein, 16 aa, Artificial Sequence
  Description of Artificial Sequence: Synthetic peptide
  MOD_RES (8)..(8): Ser or Tyr
  MOD_RES (10)..(10): Ala or Gly
  MOD_RES (11)..(11): Phe, Ile, Leu or Met
  MOD_RES (13)..(13): Asp, Phe, Val or Tyr
CARYYYGXYXXDXWGQ

SEQ ID NO: 203 - protein, 16 aa, Artificial Sequence
  Description of Artificial Sequence: Synthetic peptide
  MOD_RES (4)..(4): Asp or Gly
  MOD_RES (8)..(8): Ser or Tyr
  MOD_RES (10)..(10): Ala or Gly
  MOD_RES (11)..(11): Phe, Ile, Leu or Met
  MOD_RES (13)..(13): Asp, Phe, Val or Tyr
CARXYYGXYXXDXWGQ

SEQ ID NO: 204 - protein, 16 aa, Artificial Sequence
  Description of Artificial Sequence: Synthetic peptide
  MOD_RES (8)..(8): Ser or Tyr
  MOD_RES (10)..(10): Ala or Gly
  MOD_RES (11)..(11): Phe, Ile, Leu or Met
  MOD_RES (13)..(13): Asp, Phe, Val or Tyr
CARYGYGXYXXDXWGQ

SEQ ID NO: 205 - protein, 16 aa, Artificial Sequence
  Description of Artificial Sequence: Synthetic peptide
  MOD_RES (4)..(4): Asp or Gly
  MOD_RES (8)..(8): Ser or Tyr
  MOD_RES (10)..(10): Ala or Gly
  MOD_RES (11)..(11): Phe, Ile, Leu or Met
  MOD_RES (13)..(13): Asp, Phe, Val or Tyr
CARXGYGXYXXDXWGQ

SEQ ID NO: 206 - protein, 16 aa, Artificial Sequence
  Description of Artificial Sequence: Synthetic peptide
  MOD_RES (8)..(8): Ser or Tyr
  MOD_RES (10)..(10): Ala or Gly
  MOD_RES (11)..(11): Phe, Ile, Leu or Met
  MOD_RES (13)..(13): Asp, Phe, Val or Tyr
CARYYGGXYXXDXWGQ

SEQ ID NO: 207 - protein, 16 aa, Artificial Sequence
  Description of Artificial Sequence: Synthetic peptide
  MOD_RES (4)..(4): Asp or Gly
  MOD_RES (8)..(8): Ser or Tyr
  MOD_RES (10)..(10): Ala or Gly
  MOD_RES (11)..(11): Phe, Ile, Leu or Met
  MOD_RES (13)..(13): Asp, Phe, Val or Tyr
CARXYGGXYXXDXWGQ

SEQ ID NO: 208 - protein, 16 aa, Artificial Sequence
  Description of Artificial Sequence: Synthetic peptide
  MOD_RES (8)..(8): Ser or Tyr
  MOD_RES (10)..(10): Ala or Gly
  MOD_RES (11)..(11): Phe, Ile, Leu or Met
  MOD_RES (13)..(13): Asp, Phe, Val or Tyr
CARYGGGXYXXDXWGQ

SEQ ID NO: 209 - protein, 16 aa, Artificial Sequence
  Description of Artificial Sequence: Synthetic peptide
  MOD_RES (4)..(4): Asp or Gly
  MOD_RES (8)..(8): Ser or Tyr
  MOD_RES (10)..(10): Ala or Gly
  MOD_RES (11)..(11): Phe, Ile, Leu or Met
  MOD_RES (13)..(13): Asp, Phe, Val or Tyr
CARXGGGXYXXDXWGQ

SEQ ID NO: 210 - protein, 16 aa, Artificial Sequence
  Description of Artificial Sequence: Synthetic peptide
  MOD_RES (10)..(10): Ala or Gly
  MOD_RES (11)..(11): Phe, Ile, Leu or Met
  MOD_RES (13)..(13): Asp, Phe, Val or Tyr
CARYYYYGYXXDXWGQ

SEQ ID NO: 211 - protein, 16 aa, Artificial Sequence
  Description of Artificial Sequence: Synthetic peptide
  MOD_RES (4)..(4): Asp or Gly
  MOD_RES (8)..(8): Ser or Tyr
  MOD_RES (11)..(11): Phe, Ile, Leu or Met
  MOD_RES (13)..(13): Asp, Phe, Val or Tyr
CARXGYYXYYXDXWGQ

SEQ ID NO: 212 - protein, 16 aa, Artificial Sequence
  Description of Artificial Sequence: Synthetic peptide
  MOD_RES (4)..(4): Asp or Gly
  MOD_RES (10)..(10): Ala or Gly
  MOD_RES (11)..(11): Phe, Ile, Leu or Met
  MOD_RES (13)..(13): Asp, Phe, Val or Tyr
CARXYYYGYXXDXWGQ

SEQ ID NO: 213 - protein, 16 aa, Artificial Sequence
  Description of Artificial Sequence: Synthetic peptide
  MOD_RES (10)..(10): Ala or Gly
  MOD_RES (11)..(11): Phe, Ile, Leu or Met
  MOD_RES (13)..(13): Asp, Phe, Val or Tyr
CARYGYYGYXXDXWGQ

SEQ ID NO: 214 - protein, 16 aa, Artificial Sequence
  Description of Artificial Sequence: Synthetic peptide
  MOD_RES (4)..(4): Asp or Gly
  MOD_RES (10)..(10): Ala or Gly
  MOD_RES (11)..(11): Phe, Ile, Leu or Met
  MOD_RES (13)..(13): Asp, Phe, Val or Tyr
CARXGYYGYXXDXWGQ

SEQ ID NO: 215 - protein, 16 aa, Artificial Sequence
  Description of Artificial Sequence: Synthetic peptide
  MOD_RES (10)..(10): Ala or Gly
  MOD_RES (11)..(11): Phe, Ile, Leu or Met
  MOD_RES (13)..(13): Asp, Phe, Val or Tyr
CARYYGYGYXXDXWGQ

SEQ ID NO: 216 - protein, 16 aa, Artificial Sequence
  Description of Artificial Sequence: Synthetic peptide
  MOD_RES (4)..(4): Asp or Gly
  MOD_RES (10)..(10): Ala or Gly
  MOD_RES (11)..(11): Phe, Ile, Leu or Met
  MOD_RES (13)..(13): Asp, Phe, Val or Tyr
CARXYGYGYXXDXWGQ

SEQ ID NO: 217 - protein, 16 aa, Artificial Sequence
  Description of Artificial Sequence: Synthetic peptide
  MOD_RES (10)..(10): Ala or Gly
  MOD_RES (11)..(11): Phe, Ile, Leu or Met
  MOD_RES (13)..(13): Asp, Phe, Val or Tyr
CARYGGYGYXXDXWGQ

SEQ ID NO: 218 - protein, 16 aa, Artificial Sequence
  Description of Artificial Sequence: Synthetic peptide
  MOD_RES (4)..(4): Asp or Gly
  MOD_RES (10)..(10): Ala or Gly
  MOD_RES (11)..(11): Phe, Ile, Leu or Met
  MOD_RES (13)..(13): Asp, Phe, Val or Tyr
CARXGGYGYXXDXWGQ

SEQ ID NO: 219 - protein, 16 aa, Artificial Sequence
  Description of Artificial Sequence: Synthetic peptide
  MOD_RES (10)..(10): Ala or Gly
  MOD_RES (11)..(11): Phe, Ile, Leu or Met
  MOD_RES (13)..(13): Asp, Phe, Val or Tyr
CARYYYGGYXXDXWGQ

SEQ ID NO: 220 - protein, 16 aa, Artificial Sequence
  Description of Artificial Sequence: Synthetic peptide
  MOD_RES (4)..(4): Asp or Gly
  MOD_RES (10)..(10): Ala or Gly
  MOD_RES (11)..(11): Phe, Ile, Leu or Met
  MOD_RES (13)..(13): Asp, Phe, Val or Tyr
CARXYYGGYXXDXWGQ

SEQ ID NO: 221 - protein, 16 aa, Artificial Sequence
  Description of Artificial Sequence: Synthetic peptide
  MOD_RES (10)..(10): Ala or Gly
  MOD_RES (11)..(11): Phe, Ile, Leu or Met
  MOD_RES (13)..(13): Asp, Phe, Val or Tyr
CARYGYGGYXXDXWGQ

SEQ ID NO: 222 - protein, 16 aa, Artificial Sequence
  Description of Artificial Sequence: Synthetic peptide
  MOD_RES (8)..(8): Ser or Tyr
  MOD_RES (11)..(11): Phe, Ile, Leu or Met
  MOD_RES (13)..(13): Asp, Phe, Val or Tyr
CARYYGYXYYXDXWGQ

SEQ ID NO: 223 - protein, 16 aa, Artificial Sequence
  Description of Artificial Sequence: Synthetic peptide
  MOD_RES (4)..(4): Asp or Gly
  MOD_RES (10)..(10): Ala or Gly
  MOD_RES (11)..(11): Phe, Ile, Leu or Met
  MOD_RES (13)..(13): Asp, Phe, Val or Tyr
CARXGYGGYXXDXWGQ

SEQ ID NO: 224 - protein, 16 aa, Artificial Sequence
  Description of Artificial Sequence: Synthetic peptide
  MOD_RES (10)..(10): Ala or Gly
  MOD_RES (11)..(11): Phe, Ile, Leu or Met
  MOD_RES (13)..(13): Asp, Phe, Val or Tyr
CARYYGGGYXXDXWGQ

SEQ ID NO: 225 - protein, 16 aa, Artificial Sequence
  Description of Artificial Sequence: Synthetic peptide
  MOD_RES (4)..(4): Asp or Gly
  MOD_RES (10)..(10): Ala or Gly
  MOD_RES (11)..(11): Phe, Ile, Leu or Met
  MOD_RES (13)..(13): Asp, Phe, Val or Tyr
CARXYGGGYXXDXWGQ

SEQ ID NO: 226 - protein, 16 aa, Artificial Sequence
  Description of Artificial Sequence: Synthetic peptide
  MOD_RES (10)..(10): Ala or Gly
  MOD_RES (11)..(11): Phe, Ile, Leu or Met
  MOD_RES (13)..(13): Asp, Phe, Val or Tyr
CARYGGGGYXXDXWGQ

SEQ ID NO: 227 - protein, 16 aa, Artificial Sequence
  Description of Artificial Sequence: Synthetic peptide
  MOD_RES (4)..(4): Asp or Gly
  MOD_RES (10)..(10): Ala or Gly
  MOD_RES (11)..(11): Phe, Ile, Leu or Met
  MOD_RES (13)..(13): Asp, Phe, Val or Tyr
CARXGGGGYXXDXWGQ

SEQ ID NO: 228 - protein, 16 aa, Artificial Sequence
  Description of Artificial Sequence: Synthetic peptide
  MOD_RES (4)..(4): Asp or Gly
  MOD_RES (8)..(8): Ser or Tyr
  MOD_RES (11)..(11): Phe, Ile, Leu or Met
  MOD_RES (13)..(13): Asp, Phe, Val or Tyr
CARXYGYXYYXDXWGQ

SEQ ID NO: 229 - protein, 16 aa, Artificial Sequence
  Description of Artificial Sequence: Synthetic peptide
  MOD_RES (8)..(8): Ser or Tyr
  MOD_RES (11)..(11): Phe, Ile, Leu or Met
  MOD_RES (13)..(13): Asp, Phe, Val or Tyr
CARYGGYXYYXDXWGQ

SEQ ID NO: 230 - protein, 16 aa, Artificial Sequence
  Description of Artificial Sequence: Synthetic peptide
  MOD_RES (4)..(4): Asp or Gly
  MOD_RES (8)..(8): Ser or Tyr
  MOD_RES (11)..(11): Phe, Ile, Leu or Met
  MOD_RES (13)..(13): Asp, Phe, Val or Tyr
CARXGGYXYYXDXWGQ

SEQ ID NO: 231 - protein, 16 aa, Artificial Sequence
  Description of Artificial Sequence: Synthetic peptide
  MOD_RES (8)..(8): Ser or Tyr
  MOD_RES (11)..(11): Phe, Ile, Leu or Met
  MOD_RES (13)..(13): Asp, Phe, Val or Tyr
CARYYYGXYYXDXWGQ

SEQ ID NO: 232 - protein, 16 aa, Artificial Sequence
  Description of Artificial Sequence: Synthetic peptide
  MOD_RES (4)..(4): Asp or Gly
  MOD_RES (5)..(5): Gly or Arg
  MOD_RES (11)..(11): Phe, Ile, Leu or Met
  MOD_RES (13)..(13): Asp, Phe, Val or Tyr
CARXXYYGYYXDXWGQ

SEQ ID NO: 233 - protein, 16 aa, Artificial Sequence
  Description of Artificial Sequence: Synthetic peptide
  MOD_RES (4)..(4): Asp or Gly
  MOD_RES (11)..(11): Phe, Ile, Leu or Met
  MOD_RES (13)..(13): Asp, Phe, Val or Tyr
CARXYGYGYYXDXWGQ

SEQ ID NO: 234 - protein, 16 aa, Artificial Sequence
  Description of Artificial Sequence: Synthetic peptide
  MOD_RES (4)..(4): Asp or Gly
  MOD_RES (5)..(5): Gly or Arg
  MOD_RES (11)..(11): Phe, Ile, Leu or Met
  MOD_RES (13)..(13): Asp, Phe, Val or Tyr
CARXXGYGYYXDXWGQ

SEQ ID NO: 235 - protein, 16 aa, Artificial Sequence
  Description of Artificial Sequence: Synthetic peptide
  MOD_RES (4)..(4): Asp or Gly
  MOD_RES (11)..(11): Phe, Ile, Leu or Met
  MOD_RES (13)..(13): Asp, Phe, Val or Tyr
CARXYYGGYYXDXWGQ

SEQ ID NO: 236 - protein, 16 aa, Artificial Sequence
  Description of Artificial Sequence: Synthetic peptide
  MOD_RES (4)..(4): Asp or Gly
  MOD_RES (5)..(5): Gly or Arg
  MOD_RES (11)..(11): Phe, Ile, Leu or Met
  MOD_RES (13)..(13): Asp, Phe, Val or Tyr
CARXXYGGYYXDXWGQ

SEQ ID NO: 237 - protein, 16 aa, Artificial Sequence
  Description of Artificial Sequence: Synthetic peptide
  MOD_RES (4)..(4): Asp or Gly
  MOD_RES (11)..(11): Phe, Ile, Leu or Met
  MOD_RES (13)..(13): Asp, Phe, Val or Tyr
CARXYGGGYYXDXWGQ

SEQ ID NO: 238 - protein, 16 aa, Artificial Sequence
  Description of Artificial Sequence: Synthetic peptide
  MOD_RES (4)..(4): Asp or Gly
  MOD_RES (5)..(5): Gly or Arg
  MOD_RES (11)..(11): Phe, Ile, Leu or Met
  MOD_RES (13)..(13): Asp, Phe, Val or Tyr
CARXXGGGYYXDXWGQ

SEQ ID NO: 239 - protein, 16 aa, Artificial Sequence
  Description of Artificial Sequence: Synthetic peptide
  MOD_RES (4)..(4): Asp or Gly
  MOD_RES (8)..(8): Ser or Tyr
  MOD_RES (10)..(10): Ala or Gly
  MOD_RES (11)..(11): Phe, Ile, Leu or Met
  MOD_RES (13)..(13): Asp, Phe, Val or Tyr
CARXYYYXYXXDXWGQ

SEQ ID NO: 240 - protein, 16 aa, Artificial Sequence
  Description of Artificial Sequence: Synthetic peptide
  MOD_RES (4)..(4): Asp or Gly
  MOD_RES (5)..(5): Gly or Arg
  MOD_RES (8)..(8): Ser or Tyr
  MOD_RES (10)..(10): Ala or Gly
  MOD_RES (11)..(11): Phe, Ile, Leu or Met
  MOD_RES (13)..(13): Asp, Phe, Val or Tyr
CARXXYYXYXXDXWGQ

SEQ ID NO: 241 - protein, 16 aa, Artificial Sequence
  Description of Artificial Sequence: Synthetic peptide
  MOD_RES (4)..(4): Asp or Gly
  MOD_RES (8)..(8): Ser or Tyr
  MOD_RES (10)..(10): Ala or Gly
  MOD_RES (11)..(11): Phe, Ile, Leu or Met
  MOD_RES (13)..(13): Asp, Phe, Val or Tyr
CARXYGYXYXXDXWGQ

SEQ ID NO: 242 - protein, 16 aa, Artificial Sequence
  Description of Artificial Sequence: Synthetic peptide
  MOD_RES (4)..(4): Asp or Gly
  MOD_RES (8)..(8): Ser or Tyr
  MOD_RES (11)..(11): Phe, Ile, Leu or Met
  MOD_RES (13)..(13): Asp, Phe, Val or Tyr
CARXYYYXYYXDXWGQ

SEQ ID NO: 243 - protein, 16 aa, Artificial Sequence
  Description of Artificial Sequence: Synthetic peptide
  MOD_RES (4)..(4): Asp or Gly
  MOD_RES (5)..(5): Gly or Arg
  MOD_RES (8)..(8): Ser or Tyr
  MOD_RES (10)..(10): Ala or Gly
  MOD_RES (11)..(11): Phe, Ile, Leu or Met
  MOD_RES (13)..(13): Asp, Phe, Val or Tyr
CARXXGYXYXXDXWGQ

SEQ ID NO: 244 - protein, 16 aa, Artificial Sequence
  Description of Artificial Sequence: Synthetic peptide
  MOD_RES (4)..(4): Asp or Gly
  MOD_RES (8)..(8): Ser or Tyr
  MOD_RES (10)..(10): Ala or Gly
  MOD_RES (11)..(11): Phe, Ile, Leu or Met
  MOD_RES (13)..(13): Asp, Phe, Val or Tyr
CARXYYGXYXXDXWGQ

SEQ ID NO: 245 - protein, 16 aa, Artificial Sequence
  Description of Artificial Sequence: Synthetic peptide
  MOD_RES (4)..(4): Asp or Gly
  MOD_RES (5)..(5): Gly or Arg
  MOD_RES (8)..(8): Ser or Tyr
  MOD_RES (10)..(10): Ala or Gly
  MOD_RES (11)..(11): Phe, Ile, Leu or Met
  MOD_RES (13)..(13): Asp, Phe, Val or Tyr
CARXXYGXYXXDXWGQ

SEQ ID NO: 246 - protein, 16 aa, Artificial Sequence
  Description of Artificial Sequence: Synthetic peptide
  MOD_RES (4)..(4): Asp or Gly
  MOD_RES (8)..(8): Ser or Tyr
  MOD_RES (10)..(10): Ala or Gly
  MOD_RES (11)..(11): Phe, Ile, Leu or Met
  MOD_RES (13)..(13): Asp, Phe, Val or Tyr
CARXYGGXYXXDXWGQ

SEQ ID NO: 247 - protein, 16 aa, Artificial Sequence
  Description of Artificial Sequence: Synthetic peptide
  MOD_RES (4)..(4): Asp or Gly
  MOD_RES (5)..(5): Gly or Arg
  MOD_RES (8)..(8): Ser or Tyr
  MOD_RES (10)..(10): Ala or Gly
  MOD_RES (11)..(11): Phe, Ile, Leu or Met
  MOD_RES (13)..(13): Asp, Phe, Val or Tyr
CARXXGGXYXXDXWGQ

SEQ ID NO: 248 - protein, 16 aa, Artificial Sequence
  Description of Artificial Sequence: Synthetic peptide
  MOD_RES (4)..(4): Asp or Gly
  MOD_RES (10)..(10): Ala or Gly
  MOD_RES (11)..(11): Phe, Ile, Leu or Met
  MOD_RES (13)..(13): Asp, Phe, Val or Tyr
CARXYYYGYXXDXWGQ

SEQ ID NO: 249 - protein, 16 aa, Artificial Sequence
  Description of Artificial Sequence: Synthetic peptide
  MOD_RES (4)..(4): Asp or Gly
  MOD_RES (5)..(5): Gly or Arg
  MOD_RES (10)..(10): Ala or Gly
  MOD_RES (11)..(11): Phe, Ile, Leu or Met
  MOD_RES (13)..(13): Asp, Phe, Val or Tyr
CARXXYYGYXXDXWGQ

SEQ ID NO: 250 - protein, 16 aa, Artificial Sequence
  Description of Artificial Sequence: Synthetic peptide
  MOD_RES (4)..(4): Asp or Gly
  MOD_RES (10)..(10): Ala or Gly
  MOD_RES (11)..(11): Phe, Ile, Leu or Met
  MOD_RES (13)..(13): Asp, Phe, Val or Tyr
CARXYGYGYXXDXWGQ

SEQ ID NO: 251 - protein, 16 aa, Artificial Sequence
  Description of Artificial Sequence: Synthetic peptide
  MOD_RES (4)..(4): Asp or Gly
  MOD_RES (5)..(5): Gly or Arg
  MOD_RES (10)..(10): Ala or Gly
  MOD_RES (11)..(11): Phe, Ile, Leu or Met
  MOD_RES (13)..(13): Asp, Phe, Val or Tyr
CARXXGYGYXXDXWGQ

SEQ ID NO: 252 - protein, 16 aa, Artificial Sequence
  Description of Artificial Sequence: Synthetic peptide
  MOD_RES (4)..(4): Asp or Gly
  MOD_RES (10)..(10): Ala or Gly
  MOD_RES (11)..(11): Phe, Ile, Leu or Met
  MOD_RES (13)..(13): Asp, Phe, Val or Tyr
CARXYYGGYXXDXWGQ

SEQ ID NO: 253 - protein, 16 aa, Artificial Sequence
  Description of Artificial Sequence: Synthetic peptide
  MOD_RES (4)..(4): Asp or Gly
  MOD_RES (5)..(5): Gly or Arg
  MOD_RES (8)..(8): Ser or Tyr
  MOD_RES (11)..(11): Phe, Ile, Leu or Met
  MOD_RES (13)..(13): Asp, Phe, Val or Tyr
CARXXYYXYYXDXWGQ

SEQ ID NO: 254 - protein, 16 aa, Artificial Sequence
  Description of Artificial Sequence: Synthetic peptide
  MOD_RES (4)..(4): Asp or Gly
  MOD_RES (5)..(5): Gly or Arg
  MOD_RES (10)..(10): Ala or Gly
  MOD_RES (11)..(11): Phe, Ile, Leu or Met
  MOD_RES (13)..(13): Asp, Phe, Val or Tyr
CARXXYGGYXXDXWGQ

SEQ ID NO: 255 - protein, 16 aa, Artificial Sequence
  Description of Artificial Sequence: Synthetic peptide
  MOD_RES (4)..(4): Asp or Gly
  MOD_RES (10)..(10): Ala or Gly
  MOD_RES (11)..(11): Phe, Ile, Leu or Met
  MOD_RES (13)..(13): Asp, Phe, Val or Tyr
CARXYGGGYXXDXWGQ

SEQ ID NO: 256 - protein, 16 aa, Artificial Sequence
  Description of Artificial Sequence: Synthetic peptide
  MOD_RES (4)..(4): Asp or Gly
  MOD_RES (5)..(5): Gly or Arg
  MOD_RES (10)..(10): Ala or Gly
  MOD_RES (11)..(11): Phe, Ile, Leu or Met
  MOD_RES (13)..(13): Asp, Phe, Val or Tyr
CARXXGGGYXXDXWGQ

SEQ ID NO: 257 - protein, 16 aa, Artificial Sequence
  Description of Artificial Sequence: Synthetic peptide
  MOD_RES (4)..(4): Asp or Gly
  MOD_RES (8)..(8): Ser or Tyr
  MOD_RES (11)..(11): Phe, Ile, Leu or Met
  MOD_RES (13)..(13): Asp, Phe, Val or Tyr
CARXYGYXYYXDXWGQ

SEQ ID NO: 258 - protein, 16 aa, Artificial Sequence
  Description of Artificial Sequence: Synthetic peptide
  MOD_RES (4)..(4): Asp or Gly
  MOD_RES (5)..(5): Gly or Arg
  MOD_RES (8)..(8): Ser or Tyr
  MOD_RES (11)..(11): Phe, Ile, Leu or Met
  MOD_RES (13)..(13): Asp, Phe, Val or Tyr
CARXXGYXYYXDXWGQ

SEQ ID NO: 259 - protein, 16 aa, Artificial Sequence
  Description of Artificial Sequence: Synthetic peptide
  MOD_RES (4)..(4): Asp or Gly
  MOD_RES (8)..(8): Ser or Tyr
  MOD_RES (11)..(11): Phe, Ile, Leu or Met
  MOD_RES (13)..(13): Asp, Phe, Val or Tyr
CARXYYGXYYXDXWGQ

SEQ ID NO: 260 - protein, 16 aa, Artificial Sequence
  Description of Artificial Sequence: Synthetic peptide
  MOD_RES (4)..(4): Asp or Gly
  MOD_RES (5)..(5): Gly or Arg
  MOD_RES (8)..(8): Ser or Tyr
  MOD_RES (11)..(11): Phe, Ile, Leu or Met
  MOD_RES (13)..(13): Asp, Phe, Val or Tyr
CARXXYGXYYXDXWGQ

SEQ ID NO: 261 - protein, 16 aa, Artificial Sequence
  Description of Artificial Sequence: Synthetic peptide
  MOD_RES (4)..(4): Asp or Gly
  MOD_RES (8)..(8): Ser or Tyr
  MOD_RES (11)..(11): Phe, Ile, Leu or Met
  MOD_RES (13)..(13): Asp, Phe, Val or Tyr
CARXYGGXYYXDXWGQ

SEQ ID NO: 262 - protein, 16 aa, Artificial Sequence
  Description of Artificial Sequence: Synthetic peptide
  MOD_RES (4)..(4): Asp or Gly
  MOD_RES (5)..(5): Gly or Arg
  MOD_RES (8)..(8): Ser or Tyr
  MOD_RES (11)..(11): Phe, Ile, Leu or Met
  MOD_RES (13)..(13): Asp, Phe, Val or Tyr
CARXXGGXYYXDXWGQ

SEQ ID NO: 263 - protein, 16 aa, Artificial Sequence
  Description of Artificial Sequence: Synthetic peptide
  MOD_RES (4)..(4): Asp or Gly
  MOD_RES (11)..(11): Phe, Ile, Leu or Met
  MOD_RES (13)..(13): Asp, Phe, Val or Tyr
CARXYYYGYYXDXWGQ

SEQ ID NO: 264 - protein, 16 aa, Artificial Sequence
  Description of Artificial Sequence: Synthetic peptide
  MOD_RES (5)..(5): Asp, Gly, His or Arg
  MOD_RES (6)..(6): Ser or Tyr
  MOD_RES (7)..(7): Phe, Leu or Tyr
  MOD_RES (8)..(8): Ser or Tyr
  MOD_RES (10)..(10): Ala, Asp, Ser or Tyr
  MOD_RES (11)..(11): Phe, Ile, Leu or Met
  MOD_RES (13)..(13): Asp, Phe, Val or Tyr
CARGXXXXYXXDXWGQ

SEQ ID NO: 265 - protein, 16 aa, Artificial Sequence
  Description of Artificial Sequence: Synthetic peptide
  MOD_RES (5)..(5): Asp, Gly, His or Arg
  MOD_RES (7)..(7): Phe, Leu or Tyr
  MOD_RES (8)..(8): Ser or Tyr
  MOD_RES (10)..(10): Ala, Asp, Ser or Tyr
  MOD_RES (11)..(11): Phe, Ile, Leu or Met
  MOD_RES (13)..(13): Asp, Phe, Val or Tyr
CARGXRXXYXXDXWGQ

SEQ ID NO: 266 - protein, 16 aa, Artificial Sequence
  Description of Artificial Sequence: Synthetic peptide
  MOD_RES (5)..(5): Asp, Gly, His or Arg
  MOD_RES (6)..(6): Ser or Tyr
  MOD_RES (8)..(8): Ser or Tyr
  MOD_RES (10)..(10): Ala, Asp, Ser or Tyr
  MOD_RES (11)..(11): Phe, Ile, Leu or Met
  MOD_RES (13)..(13): Asp, Phe, Val or Tyr
CARGXXGXYXXDXWGQ

SEQ ID NO: 267 - protein, 16 aa, Artificial Sequence
  Description of Artificial Sequence: Synthetic peptide
  MOD_RES (5)..(5): Asp, Gly, His or Arg
  MOD_RES (8)..(8): Ser or Tyr
  MOD_RES (10)..(10): Ala, Asp, Ser or Tyr
  MOD_RES (11)..(11): Phe, Ile, Leu or Met
  MOD_RES (13)..(13): Asp, Phe, Val or Tyr
CARGXRGXYXXDXWGQ

SEQ ID NO: 268 - protein, 16 aa, Artificial Sequence
  Description of Artificial Sequence: Synthetic peptide
  MOD_RES (5)..(5): Asp, Gly, His or Arg
  MOD_RES (6)..(6): Ser or Tyr
  MOD_RES (7)..(7): Phe, Leu or Tyr
  MOD_RES (8)..(8): Ser or Tyr
  MOD_RES (10)..(10): Ala, Asp, Ser or Tyr
  MOD_RES (11)..(11): Phe, Ile, Leu or Met
  MOD_RES (13)..(13): Asp, Phe, Val or Tyr
CARGXXXXWXXDXWGQ

SEQ ID NO: 269 - protein, 16 aa, Artificial Sequence
  Description of Artificial Sequence: Synthetic peptide
  MOD_RES (5)..(5): Asp, Gly, His or Arg
  MOD_RES (7)..(7): Phe, Leu or Tyr
  MOD_RES (8)..(8): Ser or Tyr
  MOD_RES (10)..(10): Ala, Asp, Ser or Tyr
  MOD_RES (11)..(11): Phe, Ile, Leu or Met
  MOD_RES (13)..(13): Asp, Phe, Val or Tyr
CARGXRXXWXXDXWGQ

SEQ ID NO: 270 - protein, 16 aa, Artificial Sequence
  Description of Artificial Sequence: Synthetic peptide
  MOD_RES (5)..(5): Asp, Gly, His or Arg
  MOD_RES (6)..(6): Ser or Tyr
  MOD_RES (8)..(8): Ser or Tyr
  MOD_RES (10)..(10): Ala, Asp, Ser or Tyr
  MOD_RES (11)..(11): Phe, Ile, Leu or Met
  MOD_RES (13)..(13): Asp, Phe, Val or Tyr
CARGXXGXWXXDXWGQ

SEQ ID NO: 271 - protein, 16 aa, Artificial Sequence
  Description of Artificial Sequence: Synthetic peptide
  MOD_RES (5)..(5): Asp, Gly, His or Arg
  MOD_RES (8)..(8): Ser or Tyr
  MOD_RES (10)..(10): Ala, Asp, Ser or Tyr
  MOD_RES (11)..(11): Phe, Ile, Leu or Met
  MOD_RES (13)..(13): Asp, Phe, Val or Tyr
CARGXRGXWXXDXWGQ

SEQ ID NO: 272 - protein, 16 aa, Artificial Sequence
  Description of Artificial Sequence: Synthetic peptide
  MOD_RES (4)..(4): Ser or Tyr
  MOD_RES (5)..(5): Asp or Tyr
  MOD_RES (8)..(8): Asp, Gly, Asn or Ser
  MOD_RES (9)..(9): Gly or Ser
  MOD_RES (10)..(10): His, Pro, Ser or Tyr
  MOD_RES (12)..(12): Ala or Asp
CARXXYYXXXFXYWGQ

SEQ ID NO: 273 - protein, 16 aa, Artificial Sequence
  Description of Artificial Sequence: Synthetic peptide
  MOD_RES (5)..(5): Asp or Tyr
  MOD_RES (8)..(8): Asp, Gly, Asn or Ser
  MOD_RES (9)..(9): Gly or Ser
  MOD_RES (10)..(10): His, Pro, Ser or Tyr
  MOD_RES (12)..(12): Ala or Asp
CARGXYYXXXFXYWGQ

SEQ ID NO: 274 - protein, 16 aa, Artificial Sequence
  Description of Artificial Sequence: Synthetic peptide
  MOD_RES (4)..(4): Ser or Tyr
  MOD_RES (5)..(5): Asp or Tyr
  MOD_RES (8)..(8): Asp, Gly, Asn or Ser
  MOD_RES (9)..(9): Gly or Ser
  MOD_RES (10)..(10): His, Pro, Ser or Tyr
  MOD_RES (12)..(12): Ala or Asp
CARXXYGXXXFXYWGQ

SEQ ID NO: 275 - protein, 16 aa, Artificial Sequence
  Description of Artificial Sequence: Synthetic peptide
  MOD_RES (5)..(5): Asp or Tyr
  MOD_RES (8)..(8): Asp, Gly, Asn or Ser
  MOD_RES (9)..(9): Gly or Ser
  MOD_RES (10)..(10): His, Pro, Ser or Tyr
  MOD_RES (12)..(12): Ala or Asp
CARGXYGXXXFXYWGQ

SEQ ID NO: 276 - protein, 16 aa, Artificial Sequence
  Description of Artificial Sequence: Synthetic peptide
  MOD_RES (4)..(4): Ser or Tyr
  MOD_RES (5)..(5): Asp or Tyr
  MOD_RES (8)..(8): Asp, Gly, Asn or Ser
  MOD_RES (9)..(9): Gly or Ser
  MOD_RES (12)..(12): Ala or Asp
CARXXYYXXGFXYWGQ

SEQ ID NO: 277 - protein, 16 aa, Artificial Sequence
  Description of Artificial Sequence: Synthetic peptide
  MOD_RES (5)..(5): Asp or Tyr
  MOD_RES (8)..(8): Asp, Gly, Asn or Ser
  MOD_RES (9)..(9): Gly or Ser
  MOD_RES (12)..(12): Ala or Asp
CARGXYYXXGFXYWGQ

SEQ ID NO: 278 - protein, 16 aa, Artificial Sequence
  Description of Artificial Sequence: Synthetic peptide
  MOD_RES (4)..(4): Ser or Tyr
  MOD_RES (5)..(5): Asp or Tyr
  MOD_RES (8)..(8): Asp, Gly, Asn or Ser
  MOD_RES (9)..(9): Gly or Ser
  MOD_RES (12)..(12): Ala or Asp
CARXXYGXXGFXYWGQ

SEQ ID NO: 279 - protein, 16 aa, Artificial Sequence
  Description of Artificial Sequence: Synthetic peptide
  MOD_RES (5)..(5): Asp or Tyr
  MOD_RES (8)..(8): Asp, Gly, Asn or Ser
  MOD_RES (9)..(9): Gly or Ser
  MOD_RES (12)..(12): Ala or Asp
CARGXYGXXGFXYWGQ

SEQ ID NO: 280 - protein, 16 aa, Artificial Sequence
  Description of Artificial Sequence: Synthetic peptide
  MOD_RES (4)..(4): Asp or Gly
  MOD_RES (5)..(5): Ala, Gly, Pro or Arg
  MOD_RES (8)..(8): Ser or Tyr
  MOD_RES (9)..(9): Asp, Gly, Asn or Ser
  MOD_RES (10)..(10): Ala, Gly, Pro or Arg
  MOD_RES (11)..(11): Phe, Ile, Leu or Met
CARXXYYXXXXDYWGQ

SEQ ID NO: 281 - protein, 16 aa, Artificial Sequence
  Description of Artificial Sequence: Synthetic peptide
  MOD_RES (5)..(5): Ala, Gly, Pro or Arg
  MOD_RES (8)..(8): Ser or Tyr
  MOD_RES (9)..(9): Asp, Gly, Asn or Ser
  MOD_RES (10)..(10): Ala, Gly, Pro or Arg
  MOD_RES (11)..(11): Phe, Ile, Leu or Met
CARYXYGXXXXDYWGQ

SEQ ID NO: 282 - protein, 16 aa, Artificial Sequence
  Description of Artificial Sequence: Synthetic peptide
  MOD_RES (4)..(4): Asp or Gly
  MOD_RES (5)..(5): Ala, Gly, Pro or Arg
  MOD_RES (8)..(8): Ser or Tyr
  MOD_RES (9)..(9): Asp, Gly, Asn or Ser
  MOD_RES (10)..(10): Ala, Gly, Pro or Arg
  MOD_RES (11)..(11): Phe, Ile, Leu or Met
CARXXYGXXXXDYWGQ

SEQ ID NO: 283 - protein, 16 aa, Artificial Sequence
  Description of Artificial Sequence: Synthetic peptide
  MOD_RES (5)..(5): Ala, Gly, Pro or Arg
  MOD_RES (9)..(9): Asp, Gly, Asn or Ser
  MOD_RES (10)..(10): Ala, Gly, Pro or Arg
  MOD_RES (11)..(11): Phe, Ile, Leu or Met
CARYXYYGXXXDYWGQ

SEQ ID NO: 284 - protein, 16 aa, Artificial Sequence
  Description of Artificial Sequence: Synthetic peptide
  MOD_RES (4)..(4): Asp or Gly
  MOD_RES (5)..(5): Ala, Gly, Pro or Arg
  MOD_RES (9)..(9): Asp, Gly, Asn or Ser
  MOD_RES (10)..(10): Ala, Gly, Pro or Arg
  MOD_RES (11)..(11): Phe, Ile, Leu or Met
CARXXYYGXXXDYWGQ

SEQ ID NO: 285 - protein, 16 aa, Artificial Sequence
  Description of Artificial Sequence: Synthetic peptide
  MOD_RES (5)..(5): Ala, Gly, Pro or Arg
  MOD_RES (9)..(9): Asp, Gly, Asn or Ser
  MOD_RES (10)..(10): Ala, Gly, Pro or Arg
  MOD_RES (11)..(11): Phe, Ile, Leu or Met
CARYXYGGXXXDYWGQ

SEQ ID NO: 286 - protein, 16 aa, Artificial Sequence
  Description of Artificial Sequence: Synthetic peptide
  MOD_RES (4)..(4): Asp or Gly
  MOD_RES (5)..(5): Ala, Gly, Pro or Arg
  MOD_RES (9)..(9): Asp, Gly, Asn or Ser
  MOD_RES (10)..(10): Ala, Gly, Pro or Arg
  MOD_RES (11)..(11): Phe, Ile, Leu or Met
CARXXYGGXXXDYWGQ

SEQ ID NO: 287 - protein, 16 aa, Artificial Sequence
  Description of Artificial Sequence: Synthetic peptide
  MOD_RES (5)..(5): Ala, Gly, Pro or Arg
  MOD_RES (8)..(8): Ser or Tyr
  MOD_RES (9)..(9): Asp, Gly, Asn or Ser
  MOD_RES (10)..(10): His or Tyr
  MOD_RES (11)..(11): Phe, Ile, Leu or Met
CARYXYYXXXXDYWGQ

SEQ ID NO: 288 - protein, 16 aa, Artificial Sequence
  Description of Artificial Sequence: Synthetic peptide
  MOD_RES (4)..(4): Asp or Gly
  MOD_RES (5)..(5): Ala, Gly, Pro or Arg
  MOD_RES (8)..(8): Ser or Tyr
  MOD_RES (9)..(9): Asp, Gly, Asn or Ser
  MOD_RES (10)..(10): His or Tyr
  MOD_RES (11)..(11): Phe, Ile, Leu or Met
CARXXYYXXXXDYWGQ

SEQ ID NO: 289 - protein, 16 aa, Artificial Sequence
  Description of Artificial Sequence: Synthetic peptide
  MOD_RES (5)..(5): Ala, Gly, Pro or Arg
  MOD_RES (8)..(8): Ser or Tyr
  MOD_RES (9)..(9): Asp, Gly, Asn or Ser
  MOD_RES (10)..(10): His or Tyr
  MOD_RES (11)..(11): Phe, Ile, Leu or Met
CARYXYGXXXXDYWGQ

SEQ ID NO: 290 - protein, 16 aa, Artificial Sequence
  Description of Artificial Sequence: Synthetic peptide
  MOD_RES (4)..(4): Asp or Gly
  MOD_RES (5)..(5): Ala, Gly, Pro or Arg
  MOD_RES (8)..(8): Ser or Tyr
  MOD_RES (9)..(9): Asp, Gly, Asn or Ser
  MOD_RES (10)..(10): His or Tyr
  MOD_RES (11)..(11): Phe, Ile, Leu or Met
CARXXYGXXXXDYWGQ

SEQ ID NO: 291 - protein, 16 aa, Artificial Sequence
  Description of Artificial Sequence: Synthetic peptide
  MOD_RES (5)..(5): Ala, Gly, Pro or Arg
  MOD_RES (9)..(9): Asp, Gly, Asn or Ser
  MOD_RES (10)..(10): His or Tyr
  MOD_RES (11)..(11): Phe, Ile, Leu or Met
CARYXYYGXXXDYWGQ

SEQ ID NO: 292 - protein, 16 aa, Artificial Sequence
  Description of Artificial Sequence: Synthetic peptide
  MOD_RES (4)..(4): Asp or Gly
  MOD_RES (5)..(5): Ala, Gly, Pro or Arg
  MOD_RES (9)..(9): Asp, Gly, Asn or Ser
  MOD_RES (10)..(10): His or Tyr
  MOD_RES (11)..(11): Phe, Ile, Leu or Met
CARXXYYGXXXDYWGQ

SEQ ID NO: 293 - protein, 16 aa, Artificial Sequence
  Description of Artificial Sequence: Synthetic peptide
  MOD_RES (5)..(5): Ala, Gly, Pro or Arg
  MOD_RES (9)..(9): Asp, Gly, Asn or Ser
  MOD_RES (10)..(10): His or Tyr
  MOD_RES (11)..(11): Phe, Ile, Leu or Met
CARYXYGGXXXDYWGQ

SEQ ID NO: 294 - protein, 16 aa, Artificial Sequence
  Description of Artificial Sequence: Synthetic peptide
  MOD_RES (4)..(4): Asp or Gly
  MOD_RES (5)..(5): Ala, Gly, Pro or Arg
  MOD_RES (9)..(9): Asp, Gly, Asn or Ser
  MOD_RES (10)..(10): His or Tyr
  MOD_RES (11)..(11): Phe, Ile, Leu or Met
CARXXYGGXXXDYWGQ

SEQ ID NO: 295 - protein, 16 aa, Artificial Sequence
  Description of Artificial Sequence: Synthetic peptide
  MOD_RES (5)..(5): Ala, Gly, Pro or Arg
  MOD_RES (8)..(8): Ser or Tyr
  MOD_RES (9)..(9): Asp, Gly, Asn or Ser
  MOD_RES (10)..(10): Ala, Gly, Pro or Arg
  MOD_RES (11)..(11): Phe, Ile, Leu or Met
CARYXYYXXXXDYWGQ

SEQ ID NO: 296 - protein, 16 aa, Artificial Sequence
  Description of Artificial Sequence: Synthetic peptide
  MOD_RES (4)..(4): Glu or Gly
  MOD_RES (9)..(9): Ala or Ser
  MOD_RES (10)..(10): Ser or Tyr
  MOD_RES (12)..(12): Ala or Asp
CARXYYYGXXGXYWGQ

SEQ ID NO: 297 - protein, 16 aa, Artificial Sequence
  Description of Artificial Sequence: Synthetic peptide
  MOD_RES (4)..(4): Ser or Tyr
  MOD_RES (5)..(5): Asp, Gly, Asn or Ser
  MOD_RES (9)..(9): Ala or Ser
  MOD_RES (10)..(10): Ser or Tyr
  MOD_RES (12)..(12): Ala or Asp
CARXXYYGXXGXYWGQ

SEQ ID NO: 298 - protein, 16 aa, Artificial Sequence
  Description of Artificial Sequence: Synthetic peptide
  MOD_RES (4)..(4): Glu or Gly
  MOD_RES (5)..(5): Asp, Gly, Asn or Ser
  MOD_RES (9)..(9): Ala or Ser
  MOD_RES (10)..(10): Ser or Tyr
  MOD_RES (12)..(12): Ala or Asp
CARXXYYGXXGXYWGQ

SEQ ID NO: 299 - protein, 16 aa, Artificial Sequence
  Description of Artificial Sequence: Synthetic peptide
  MOD_RES (4)..(4): Ser or Tyr
  MOD_RES (9)..(9): Ala or Ser
  MOD_RES (10)..(10): Gly, Arg or Trp
  MOD_RES (12)..(12): Ala or Asp
CARXYYYGXXGXYWGQ

SEQ ID NO: 300 - protein, 16 aa, Artificial Sequence
  Description of Artificial Sequence: Synthetic peptide
  MOD_RES (4)..(4): Glu or Gly
  MOD_RES (9)..(9): Ala or Ser
  MOD_RES (10)..(10): Gly, Arg or Trp
  MOD_RES (12)..(12): Ala or Asp
CARXYYYGXXGXYWGQ

SEQ ID NO: 301 - protein, 16 aa, Artificial Sequence
  Description of Artificial Sequence: Synthetic peptide
  MOD_RES (4)..(4): Ser or Tyr
  MOD_RES (5)..(5): Asp, Gly, Asn or Ser
  MOD_RES (9)..(9): Ala or Ser
  MOD_RES (10)..(10): Gly, Arg or Trp
  MOD_RES (12)..(12): Ala or Asp
CARXXYYGXXGXYWGQ

SEQ ID NO: 302 - protein, 16 aa, Artificial Sequence
  Description of Artificial Sequence: Synthetic peptide
  MOD_RES (4)..(4): Glu or Gly
  MOD_RES (5)..(5): Asp, Gly, Asn or Ser
  MOD_RES (9)..(9): Ala or Ser
  MOD_RES (10)..(10): Gly, Arg or Trp
  MOD_RES (12)..(12): Ala or Asp
CARXXYYGXXGXYWGQ

SEQ ID NO: 303 - protein, 16 aa, Artificial Sequence
  Description of Artificial Sequence: Synthetic peptide
  MOD_RES (4)..(4): Ser or Tyr
  MOD_RES (9)..(9): Ala or Ser
  MOD_RES (10)..(10): Ser or Tyr
  MOD_RES (11)..(11): Phe or Ser
  MOD_RES (12)..(12): Ala or Asp
CARXYYYGXXXXYWGQ

SEQ ID NO: 304 - protein, 16 aa, Artificial Sequence
  Description of Artificial Sequence: Synthetic peptide
  MOD_RES (4)..(4): Glu or Gly
  MOD_RES (9)..(9): Ala or Ser
  MOD_RES (10)..(10): Ser or Tyr
  MOD_RES (11)..(11): Phe or Ser
  MOD_RES (12)..(12): Ala or Asp
CARXYYYGXXXXYWGQ

SEQ ID NO: 305 - protein, 16 aa, Artificial Sequence
  Description of Artificial Sequence: Synthetic peptide
  MOD_RES (4)..(4): Ser or Tyr
  MOD_RES (5)..(5): Asp, Gly, Asn or Ser
  MOD_RES (9)..(9): Ala or Ser
  MOD_RES (10)..(10): Ser or Tyr
  MOD_RES (11)..(11): Phe or Ser
  MOD_RES (12)..(12): Ala or Asp
CARXXYYGXXXXYWGQ

SEQ ID NO: 306 - protein, 16 aa, Artificial Sequence
  Description of Artificial Sequence: Synthetic peptide
  MOD_RES (4)..(4): Glu or Gly
  MOD_RES (5)..(5): Asp, Gly, Asn or Ser
  MOD_RES (9)..(9): Ala or Ser
  MOD_RES (10)..(10): Ser or Tyr
  MOD_RES (11)..(11): Phe or Ser
  MOD_RES (12)..(12): Ala or Asp
CARXXYYGXXXXYWGQ

SEQ ID NO: 307 - protein, 16 aa, Artificial Sequence
  Description of Artificial Sequence: Synthetic peptide
  MOD_RES (4)..(4): Ser or Tyr
  MOD_RES (9)..(9): Ala or Ser
  MOD_RES (10)..(10): Gly, Arg or Trp
  MOD_RES (11)..(11): Phe or Ser
  MOD_RES (12)..(12): Ala or Asp
CARXYYYGXXXXYWGQ

SEQ ID NO: 308 - protein, 16 aa, Artificial Sequence
  Description of Artificial Sequence: Synthetic peptide
  MOD_RES (4)..(4): Glu or Gly
  MOD_RES (9)..(9): Ala or Ser
  MOD_RES (10)..(10): Gly, Arg or Trp
  MOD_RES (11)..(11): Phe or Ser
  MOD_RES (12)..(12): Ala or Asp
CARXYYYGXXXXYWGQ

SEQ ID NO: 309 - protein, 16 aa, Artificial Sequence
  Description of Artificial Sequence: Synthetic peptide
  MOD_RES (4)..(4): Ser or Tyr
  MOD_RES (5)..(5): Asp, Gly, Asn or Ser
  MOD_RES (9)..(9): Ala or Ser
  MOD_RES (10)..(10): Gly, Arg or Trp
  MOD_RES (11)..(11): Phe or Ser
  MOD_RES (12)..(12): Ala or Asp
CARXXYYGXXXXYWGQ

SEQ ID NO: 310 - protein, 16 aa, Artificial Sequence
  Description of Artificial Sequence: Synthetic peptide
  MOD_RES (4)..(4): Glu or Gly
  MOD_RES (5)..(5): Asp, Gly, Asn or Ser
  MOD_RES (9)..(9): Ala or Ser
  MOD_RES (10)..(10): Gly, Arg or Trp
  MOD_RES (11)..(11): Phe or Ser
  MOD_RES (12)..(12): Ala or Asp
CARXXYYGXXXXYWGQ

SEQ ID NO: 311 - protein, 16 aa, Artificial Sequence
  Description of Artificial Sequence: Synthetic peptide
  MOD_RES (4)..(4): Ser or Tyr
  MOD_RES (9)..(9): Ala or Ser
  MOD_RES (10)..(10): Ser or Tyr
  MOD_RES (12)..(12): Ala or Asp
CARXYYYGXXGXYWGQ

SEQ ID NO: 312 - protein, 16 aa, Artificial Sequence
  Description of Artificial Sequence: Synthetic peptide
  MOD_RES (4)..(4): Gly, Asp, Glu, Lys, Asn, Arg or Ser
  MOD_RES (5)..(5): His, Pro, Ser or Tyr
  MOD_RES (6)..(6): Phe, His, Leu, Pro, Ser or Tyr
  MOD_RES (7)..(7): Ser or Tyr
  MOD_RES (10)..(10): Ala or Gly
  MOD_RES (11)..(11): Phe, Ile, Leu or Met
CARXXXXYYXXDYWGQ

SEQ ID NO: 313 - protein, 16 aa, Artificial Sequence
  Description of Artificial Sequence: Synthetic peptide
  MOD_RES (4)..(4): Gly, Asp, Glu, Lys, Asn, Arg or Ser
  MOD_RES (6)..(6): Phe, His, Leu, Pro, Ser or Tyr
  MOD_RES (7)..(7): Ser or Tyr
  MOD_RES (10)..(10): Ala or Gly
  MOD_RES (11)..(11): Phe, Ile, Leu or Met
CARXGXXYYXXDYWGQ

SEQ ID NO: 314 - protein, 16 aa, Artificial Sequence
  Description of Artificial Sequence: Synthetic peptide
  MOD_RES (4)..(4): Gly, Asp, Glu, Lys, Asn, Arg or Ser
  MOD_RES (5)..(5): His, Pro, Ser or Tyr
  MOD_RES (6)..(6): Phe, His, Leu, Pro, Ser or Tyr
  MOD_RES (7)..(7): Ser or Tyr
  MOD_RES (9)..(9): Asp or Gly
  MOD_RES (10)..(10): Ala or Gly
  MOD_RES (11)..(11): Phe, Ile, Leu or Met
CARXXXXYXXXDYWGQ

SEQ ID NO: 315 - protein, 16 aa, Artificial Sequence
  Description of Artificial Sequence: Synthetic peptide
  MOD_RES (4)..(4): Gly, Asp, Glu, Lys, Asn, Arg or Ser
  MOD_RES (6)..(6): Phe, His, Leu, Pro, Ser or Tyr
  MOD_RES (7)..(7): Ser or Tyr
  MOD_RES (9)..(9): Asp or Gly
  MOD_RES (10)..(10): Ala or Gly
  MOD_RES (11)..(11): Phe, Ile, Leu or Met
CARXGXXYXXXDYWGQ

SEQ ID NO: 316 - protein, 16 aa, Artificial Sequence
  Description of Artificial Sequence: Synthetic peptide
  MOD_RES (6)..(6): Ser or Tyr
  MOD_RES (8)..(8): Ser or Tyr
  MOD_RES (11)..(11): Phe, Ile, Leu or Met
  MOD_RES (13)..(13): Asp, Phe, Val or Tyr
CARGYXYXWYXDXWGQ

SEQ ID NO: 317 - protein, 16 aa, Artificial Sequence
  Description of Artificial Sequence: Synthetic peptide
  MOD_RES (6)..(6): Ser or Tyr
  MOD_RES (8)..(8): Ser or Tyr
  MOD_RES (11)..(11): Phe, Ile, Leu or Met
  MOD_RES (13)..(13): Asp, Phe, Val or Tyr
CARYRXYXWYXDXWGQ

SEQ ID NO: 318 - protein, 16 aa, Artificial Sequence
  Description of Artificial Sequence: Synthetic peptide
  MOD_RES (6)..(6): Ser or Tyr
  MOD_RES (8)..(8): Ser or Tyr
  MOD_RES (11)..(11): Phe, Ile, Leu or Met
  MOD_RES (13)..(13): Asp, Phe, Val or Tyr
CARGRXYXWYXDXWGQ

SEQ ID NO: 319 - protein, 16 aa, Artificial Sequence
  Description of Artificial Sequence: Synthetic peptide
  MOD_RES (6)..(6): Ser or Tyr
  MOD_RES (8)..(8): Ser or Tyr
  MOD_RES (11)..(11): Phe, Ile, Leu or Met
  MOD_RES (13)..(13): Asp, Phe, Val or Tyr
CARYYXGXWYXDXWGQ

SEQ ID NO: 320 - protein, 16 aa, Artificial Sequence
  Description of Artificial Sequence: Synthetic peptide
  MOD_RES (6)..(6): Ser or Tyr
  MOD_RES (8)..(8): Ser or Tyr
  MOD_RES (11)..(11): Phe, Ile, Leu or Met
  MOD_RES (13)..(13): Asp, Phe, Val or Tyr
CARGYXGXWYXDXWGQ

SEQ ID NO: 321 - protein, 16 aa, Artificial Sequence
  Description of Artificial Sequence: Synthetic peptide
  MOD_RES (6)..(6): Ser or Tyr
  MOD_RES (8)..(8): Ser or Tyr
  MOD_RES (11)..(11): Phe, Ile, Leu or Met
  MOD_RES (13)..(13): Asp, Phe, Val or Tyr
CARYRXGXWYXDXWGQ

SEQ ID NO: 322 - protein, 16 aa, Artificial Sequence
  Description of Artificial Sequence: Synthetic peptide
  MOD_RES (6)..(6): Ser or Tyr
  MOD_RES (8)..(8): Ser or Tyr
  MOD_RES (11)..(11): Phe, Ile, Leu or Met
  MOD_RES (13)..(13): Asp, Phe, Val or Tyr
CARGRXGXWYXDXWGQ

SEQ ID NO: 323 - protein, 16 aa, Artificial Sequence
  Description of Artificial Sequence: Synthetic peptide
  MOD_RES (6)..(6): Ser or Tyr
  MOD_RES (8)..(8): Ser or Tyr
  MOD_RES (10)..(10): Ala or Gly
  MOD_RES (11)..(11): Phe, Ile, Leu or Met
  MOD_RES (13)..(13): Asp, Phe, Val or Tyr
CARYYXYXYXXDXWGQ

SEQ ID NO: 324 - protein, 16 aa, Artificial Sequence
  Description of Artificial Sequence: Synthetic peptide
  MOD_RES (6)..(6): Ser or Tyr
  MOD_RES (8)..(8): Ser or Tyr
  MOD_RES (10)..(10): Ala or Gly
  MOD_RES (11)..(11): Phe, Ile, Leu or Met
  MOD_RES (13)..(13): Asp, Phe, Val or Tyr
CARGYXYXYXXDXWGQ

SEQ ID NO: 325 - protein, 16 aa, Artificial Sequence
  Description of Artificial Sequence: Synthetic peptide
  MOD_RES (6)..(6): Ser or Tyr
  MOD_RES (8)..(8): Ser or Tyr
  MOD_RES (10)..(10): Ala or Gly
  MOD_RES (11)..(11): Phe, Ile, Leu or Met
  MOD_RES (13)..(13): Asp, Phe, Val or Tyr
CARYRXYXYXXDXWGQ

SEQ ID NO: 326 - protein, 16 aa, Artificial Sequence
  Description of Artificial Sequence: Synthetic peptide
  MOD_RES (6)..(6): Ser or Tyr
  MOD_RES (8)..(8): Ser or Tyr
  MOD_RES (11)..(11): Phe, Ile, Leu or Met
  MOD_RES (13)..(13): Asp, Phe, Val or Tyr
CARYYXYXYYXDXWGQ

SEQ ID NO: 327 - protein, 16 aa, Artificial Sequence
  Description of Artificial Sequence: Synthetic peptide
  MOD_RES (6)..(6): Ser or Tyr
  MOD_RES (8)..(8): Ser or Tyr
  MOD_RES (10)..(10): Ala or Gly
  MOD_RES (11)..(11): Phe, Ile, Leu or Met
  MOD_RES (13)..(13): Asp, Phe, Val or Tyr
CARGRXYXYXXDXWGQ

SEQ ID NO: 328 - protein, 16 aa, Artificial Sequence
  Description of Artificial Sequence: Synthetic peptide
  MOD_RES (6)..(6): Ser or Tyr
  MOD_RES (8)..(8): Ser or Tyr
  MOD_RES (10)..(10): Ala or Gly
  MOD_RES (11)..(11): Phe, Ile, Leu or Met
  MOD_RES (13)..(13): Asp, Phe, Val or Tyr
CARYYXGXYXXDXWGQ

SEQ ID NO: 329 - protein, 16 aa, Artificial Sequence
  Description of Artificial Sequence: Synthetic peptide
  MOD_RES (6)..(6): Ser or Tyr
  MOD_RES (8)..(8): Ser or Tyr
  MOD_RES (10)..(10): Ala or Gly
  MOD_RES (11)..(11): Phe, Ile, Leu or Met
  MOD_RES (13)..(13): Asp, Phe, Val or Tyr
CARGYXGXYXXDXWGQ

SEQ ID NO: 330 - protein, 16 aa, Artificial Sequence
  Description of Artificial Sequence: Synthetic peptide
  MOD_RES (6)..(6): Ser or Tyr
  MOD_RES (8)..(8): Ser or Tyr
  MOD_RES (10)..(10): Ala or Gly
  MOD_RES (11)..(11): Phe, Ile, Leu or Met
  MOD_RES (13)..(13): Asp, Phe, Val or Tyr
CARYRXGXYXXDXWGQ

SEQ ID NO: 331 - protein, 16 aa, Artificial Sequence
  Description of Artificial Sequence: Synthetic peptide
  MOD_RES (6)..(6): Ser or Tyr
  MOD_RES (8)..(8): Ser or Tyr
  MOD_RES (10)..(10): Ala or Gly
  MOD_RES (11)..(11): Phe, Ile, Leu or Met
  MOD_RES (13)..(13): Asp, Phe, Val or Tyr
CARGRXGXYXXDXWGQ

SEQ ID NO: 332 - protein, 16 aa, Artificial Sequence
  Description of Artificial Sequence: Synthetic peptide
  MOD_RES (6)..(6): Ser or Tyr
  MOD_RES (8)..(8): Ser or Tyr
  MOD_RES (10)..(10): Ala or Gly
  MOD_RES (11)..(11): Phe, Ile, Leu or Met
  MOD_RES (13)..(13): Asp, Phe, Val or Tyr
CARYYXYXWXXDXWGQ

SEQ ID NO: 333 - protein, 16 aa, Artificial Sequence
  Description of Artificial Sequence: Synthetic peptide
  MOD_RES (6)..(6): Ser or Tyr
  MOD_RES (8)..(8): Ser or Tyr
  MOD_RES (10)..(10): Ala or Gly
  MOD_RES (11)..(11): Phe, Ile, Leu or Met
  MOD_RES (13)..(13): Asp, Phe, Val or Tyr
CARGYXYXWXXDXWGQ

SEQ ID NO: 334 - protein, 16 aa, Artificial Sequence
  Description of Artificial Sequence: Synthetic peptide
  MOD_RES (6)..(6): Ser or Tyr
  MOD_RES (8)..(8): Ser or Tyr
  MOD_RES (10)..(10): Ala or Gly
  MOD_RES (11)..(11): Phe, Ile, Leu or Met
  MOD_RES (13)..(13): Asp, Phe, Val or Tyr
CARYRXYXWXXDXWGQ

SEQ ID NO: 335 - protein, 16 aa, Artificial Sequence
  Description of Artificial Sequence: Synthetic peptide
  MOD_RES (6)..(6): Ser or Tyr
  MOD_RES (8)..(8): Ser or Tyr
  MOD_RES (10)..(10): Ala or Gly
  MOD_RES (11)..(11): Phe, Ile, Leu or Met
  MOD_RES (13)..(13): Asp, Phe, Val or Tyr
CARGRXYXWXXDXWGQ

SEQ ID NO: 336 - protein, 16 aa, Artificial Sequence
  Description of Artificial Sequence: Synthetic peptide
  MOD_RES (6)..(6): Ser or Tyr
  MOD_RES (8)..(8): Ser or Tyr
  MOD_RES (10)..(10): Ala or Gly
  MOD_RES (11)..(11): Phe, Ile, Leu or Met
  MOD_RES (13)..(13): Asp, Phe, Val or Tyr
CARYYXGXWXXDXWGQ

SEQ ID NO: 337 - protein, 16 aa, Artificial Sequence
  Description of Artificial Sequence: Synthetic peptide
  MOD_RES (6)..(6): Ser or Tyr
  MOD_RES (8)..(8): Ser or Tyr
  MOD_RES (11)..(11): Phe, Ile, Leu or Met
  MOD_RES (13)..(13): Asp, Phe, Val or Tyr
CARGYXYXYYXDXWGQ

SEQ ID NO: 338 - protein, 16 aa, Artificial Sequence
  Description of Artificial Sequence: Synthetic peptide
  MOD_RES (6)..(6): Ser or Tyr
  MOD_RES (8)..(8): Ser or Tyr
  MOD_RES (10)..(10): Ala or Gly
  MOD_RES (11)..(11): Phe, Ile, Leu or Met
  MOD_RES (13)..(13): Asp, Phe, Val or Tyr
CARGYXGXWXXDXWGQ

SEQ ID NO: 339 - protein, 16 aa, Artificial Sequence
  Description of Artificial Sequence: Synthetic peptide
  MOD_RES (6)..(6): Ser or Tyr
  MOD_RES (8)..(8): Ser or Tyr
  MOD_RES (10)..(10): Ala or Gly
  MOD_RES (11)..(11): Phe, Ile, Leu or Met
  MOD_RES (13)..(13): Asp, Phe, Val or Tyr
CARYRXGXWXXDXWGQ

SEQ ID NO: 340 - protein, 16 aa, Artificial Sequence
  Description of Artificial Sequence: Synthetic peptide
  MOD_RES (6)..(6): Ser or Tyr
  MOD_RES (8)..(8): Ser or Tyr
  MOD_RES (10)..(10): Ala or Gly
  MOD_RES (11)..(11): Phe, Ile, Leu or Met
  MOD_RES (13)..(13): Asp, Phe, Val or Tyr
CARGRXGXWXXDXWGQ

SEQ ID NO: 341 - protein, 16 aa, Artificial Sequence
  Description of Artificial Sequence: Synthetic peptide
  MOD_RES (6)..(6): Ser or Tyr
  MOD_RES (8)..(8): Ser or Tyr
  MOD_RES (11)..(11): Phe, Ile, Leu or Met
  MOD_RES (13)..(13): Asp, Phe, Val or Tyr
CARYRXYXYYXDXWGQ

SEQ ID NO: 342 - protein, 16 aa, Artificial Sequence
  Description of Artificial Sequence: Synthetic peptide
  MOD_RES (6)..(6): Ser or Tyr
  MOD_RES (8)..(8): Ser or Tyr
  MOD_RES (11)..(11): Phe, Ile, Leu or Met
  MOD_RES (13)..(13): Asp, Phe, Val or Tyr
CARGRXYXYYXDXWGQ

SEQ ID NO: 343 - protein, 16 aa, Artificial Sequence
  Description of Artificial Sequence: Synthetic peptide
  MOD_RES (6)..(6): Ser or Tyr
  MOD_RES (8)..(8): Ser or Tyr
  MOD_RES (11)..(11): Phe, Ile, Leu or Met
  MOD_RES (13)..(13): Asp, Phe, Val or Tyr
CARYYXGXYYXDXWGQ

SEQ ID NO: 344 - protein, 16 aa, Artificial Sequence
  Description of Artificial Sequence: Synthetic peptide
  MOD_RES (6)..(6): Ser or Tyr
  MOD_RES (8)..(8): Ser or Tyr
  MOD_RES (11)..(11): Phe, Ile, Leu or Met
  MOD_RES (13)..(13): Asp, Phe, Val or Tyr
CARGYXGXYYXDXWGQ

SEQ ID NO: 345 - protein, 16 aa, Artificial Sequence
  Description of Artificial Sequence: Synthetic peptide
  MOD_RES (6)..(6): Ser or Tyr
  MOD_RES (8)..(8): Ser or Tyr
  MOD_RES (11)..(11): Phe, Ile, Leu or Met
  MOD_RES (13)..(13): Asp, Phe, Val or Tyr
CARYRXGXYYXDXWGQ

SEQ ID NO: 346 - protein, 16 aa, Artificial Sequence
  Description of Artificial Sequence: Synthetic peptide
  MOD_RES (6)..(6): Ser or Tyr
  MOD_RES (8)..(8): Ser or Tyr
  MOD_RES (11)..(11): Phe, Ile, Leu or Met
  MOD_RES (13)..(13): Asp, Phe, Val or Tyr
CARGRXGXYYXDXWGQ

SEQ ID NO: 347 - protein, 16 aa, Artificial Sequence
  Description of Artificial Sequence: Synthetic peptide
  MOD_RES (6)..(6): Ser or Tyr
  MOD_RES (8)..(8): Ser or Tyr
  MOD_RES (11)..(11): Phe, Ile, Leu or Met
  MOD_RES (13)..(13): Asp, Phe, Val or Tyr
CARYYXYXWYXDXWGQ

SEQ ID NO: 348 - protein, 16 aa, Artificial Sequence
  Description of Artificial Sequence: Synthetic peptide
  MOD_RES (4)..(4): His or Tyr
  MOD_RES (5)..(6): Ser or Tyr
  MOD_RES (7)..(7): Asp, Gly, Asn or Ser
  MOD_RES (8)..(8): His, Pro, Ser or Tyr
  MOD_RES (10)..(10): Ala, Asp, Ser or Tyr
  MOD_RES (11)..(11): Phe, Ile, Leu or Met
CARXXXXXYXXDYWGQ

SEQ ID NO: 349 - protein, 16 aa, Artificial Sequence
  Description of Artificial Sequence: Synthetic peptide
  MOD_RES (4)..(4): His or Tyr
  MOD_RES (6)..(6): Ser or Tyr
  MOD_RES (7)..(7): Asp, Gly, Asn or Ser
  MOD_RES (8)..(8): His, Pro, Ser or Tyr
  MOD_RES (10)..(10): Ala, Asp, Ser or Tyr
  MOD_RES (11)..(11): Phe, Ile, Leu or Met
CARXGXXXYXXDYWGQ

SEQ ID NO: 350 - protein, 16 aa, Artificial Sequence
  Description of Artificial Sequence: Synthetic peptide
  MOD_RES (4)..(4): His or Tyr
  MOD_RES (5)..(5): Ser or Tyr
  MOD_RES (7)..(7): Asp, Gly, Asn or Ser
  MOD_RES (8)..(8): His, Pro, Ser or Tyr
  MOD_RES (10)..(10): Ala, Asp, Ser or Tyr
  MOD_RES (11)..(11): Phe, Ile, Leu or Met
CARXXGXXYXXDYWGQ

SEQ ID NO: 351 - protein, 16 aa, Artificial Sequence
  Description of Artificial Sequence: Synthetic peptide
  MOD_RES (4)..(4): His or Tyr
  MOD_RES (7)..(7): Asp, Gly, Asn or Ser
  MOD_RES (8)..(8): His, Pro, Ser or Tyr
  MOD_RES (10)..(10): Ala, Asp, Ser or Tyr
  MOD_RES (11)..(11): Phe, Ile, Leu or Met
CARXGGXXYXXDYWGQ

SEQ ID NO: 352 - protein, 16 aa, Artificial Sequence
  Description of Artificial Sequence: Synthetic peptide
  MOD_RES (4)..(4): His or Tyr
  MOD_RES (5)..(6): Ser or Tyr
  MOD_RES (7)..(7): Asp, Gly, Asn or Ser
  MOD_RES (10)..(10): Ala, Asp, Ser or Tyr
  MOD_RES (11)..(11): Phe, Ile, Leu or Met
CARXXXXGYXXDYWGQ

SEQ ID NO: 353 - protein, 16 aa, Artificial Sequence
  Description of Artificial Sequence: Synthetic peptide
  MOD_RES (4)..(4): His or Tyr
  MOD_RES (6)..(6): Ser or Tyr
  MOD_RES (7)..(7): Asp, Gly, Asn or Ser
  MOD_RES (10)..(10): Ala, Asp, Ser or Tyr
  MOD_RES (11)..(11): Phe, Ile, Leu or Met
CARXGXXGYXXDYWGQ

SEQ ID NO: 354 - protein, 16 aa, Artificial Sequence
  Description of Artificial Sequence: Synthetic peptide
  MOD_RES (4)..(4): His or Tyr
  MOD_RES (5)..(5): Ser or Tyr
  MOD_RES (7)..(7): Asp, Gly, Asn or Ser
  MOD_RES (10)..(10): Ala, Asp, Ser or Tyr
  MOD_RES (11)..(11): Phe, Ile, Leu or Met
CARXXGXGYXXDYWGQ

SEQ ID NO: 355 - protein, 16 aa, Artificial Sequence
  Description of Artificial Sequence: Synthetic peptide
  MOD_RES (4)..(4): His or Tyr
  MOD_RES (7)..(7): Asp, Gly, Asn or Ser
  MOD_RES (10)..(10): Ala, Asp, Ser or Tyr
  MOD_RES (11)..(11): Phe, Ile, Leu or Met
CARXGGXGYXXDYWGQ

SEQ ID NO: 356 - protein, 17 aa, Artificial Sequence
  Description of Artificial Sequence: Synthetic peptide
  MOD_RES (4)..(4): Asp or Gly
  MOD_RES (8)..(8): Ser or Tyr
  MOD_RES (12)..(12): Phe, Ile, Leu or Met
  MOD_RES (14)..(14): Asp, Phe, Val or Tyr
CARXGGYXGYYXDXWGQ

SEQ ID NO: 357 - protein, 17 aa, Artificial Sequence
  Description of Artificial Sequence: Synthetic peptide
  MOD_RES (4)..(4): Asp or Gly
  MOD_RES (8)..(8): Ser or Tyr
  MOD_RES (12)..(12): Phe, Ile, Leu or Met
  MOD_RES (14)..(14): Asp, Phe, Val or Tyr
CARXGYGXGYYXDXWGQ

SEQ ID NO: 358 - protein, 17 aa, Artificial Sequence
  Description of Artificial Sequence: Synthetic peptide
  MOD_RES (4)..(4): Asp or Gly
  MOD_RES (8)..(8): Ser or Tyr
  MOD_RES (12)..(12): Phe, Ile, Leu or Met
  MOD_RES (14)..(14): Asp, Phe, Val or Tyr
CARXGGGXGYYXDXWGQ

SEQ ID NO: 359 - protein, 17 aa, Artificial Sequence
  Description of Artificial Sequence: Synthetic peptide
  MOD_RES (4)..(4): Asp or Gly
  MOD_RES (12)..(12): Phe, Ile, Leu or Met
  MOD_RES (14)..(14): Asp, Phe, Val or Tyr
CARXGYYGGYYXDXWGQ

SEQ ID NO: 360 - protein, 17 aa, Artificial Sequence
  Description of Artificial Sequence: Synthetic peptide
  MOD_RES (4)..(4): Asp or Gly
  MOD_RES (12)..(12): Phe, Ile, Leu or Met
  MOD_RES (14)..(14): Asp, Phe, Val or Tyr
CARXGGYGGYYXDXWGQ

SEQ ID NO: 361 - protein, 17 aa, Artificial Sequence
  Description of Artificial Sequence: Synthetic peptide
  MOD_RES (4)..(4): Asp or Gly
  MOD_RES (12)..(12): Phe, Ile, Leu or Met
  MOD_RES (14)..(14): Asp, Phe, Val or Tyr
CARXGYGGGYYXDXWGQ

SEQ ID NO: 362 - protein, 17 aa, Artificial Sequence
  Description of Artificial Sequence: Synthetic peptide
  MOD_RES (4)..(4): Asp or Gly
  MOD_RES (12)..(12): Phe, Ile, Leu or Met
  MOD_RES (14)..(14): Asp, Phe, Val or Tyr
CARXGGGGGYYXDXWGQ

SEQ ID NO: 363 - protein, 17 aa, Artificial Sequence
  Description of Artificial Sequence: Synthetic peptide
  MOD_RES (4)..(4): Asp or Gly
  MOD_RES (8)..(9): Ser or Tyr
  MOD_RES (11)..(11): Ala or Gly
  MOD_RES (12)..(12): Phe, Ile, Leu or Met
  MOD_RES (14)..(14): Asp, Phe, Val or Tyr
CARXGYYXXYXXDXWGQ

SEQ ID NO: 364 - protein, 17 aa, Artificial Sequence
  Description of Artificial Sequence: Synthetic peptide
  MOD_RES (4)..(4): Asp or Gly
  MOD_RES (8)..(9): Ser or Tyr
  MOD_RES (11)..(11): Ala or Gly
  MOD_RES (12)..(12): Phe, Ile, Leu or Met
  MOD_RES (14)..(14): Asp, Phe, Val or Tyr
CARXGGYXXYXXDXWGQ

SEQ ID NO: 365 - protein, 17 aa, Artificial Sequence
  Description of Artificial Sequence: Synthetic peptide
  MOD_RES (4)..(4): Asp or Gly
  MOD_RES (8)..(9): Ser or Tyr
  MOD_RES (11)..(11): Ala or Gly
  MOD_RES (12)..(12): Phe, Ile, Leu or Met
  MOD_RES (14)..(14): Asp, Phe, Val or Tyr
CARXGYGXXYXXDXWGQ

SEQ ID NO: 366 - protein, 17 aa, Artificial Sequence
  Description of Artificial Sequence: Synthetic peptide
  MOD_RES (4)..(4): Asp or Gly
  MOD_RES (8)..(9): Ser or Tyr
  MOD_RES (12)..(12): Phe, Ile, Leu or Met
  MOD_RES (14)..(14): Asp, Phe, Val or Tyr
CARXGYYXXYYXDXWGQ

SEQ ID NO: 367 - protein, 17 aa, Artificial Sequence
  Description of Artificial Sequence: Synthetic peptide
  MOD_RES (4)..(4): Asp or Gly
  MOD_RES (8)..(9): Ser or Tyr
  MOD_RES (11)..(11): Ala or Gly
  MOD_RES (12)..(12): Phe, Ile, Leu or Met
  MOD_RES (14)..(14): Asp, Phe, Val or Tyr
CARXGGGXXYXXDXWGQ

SEQ ID NO: 368 - protein, 17 aa, Artificial Sequence
  Description of Artificial Sequence: Synthetic peptide
  MOD_RES (4)..(4): Asp or Gly
  MOD_RES (9)..(9): Ser or Tyr
  MOD_RES (11)..(11): Ala or Gly
  MOD_RES (12)..(12): Phe, Ile, Leu or Met
  MOD_RES (14)..(14): Asp, Phe, Val or Tyr
CARXGYYGXYXXDXWGQ

SEQ ID NO: 369 - protein, 17 aa, Artificial Sequence
  Description of Artificial Sequence: Synthetic peptide
  MOD_RES (4)..(4): Asp or Gly
  MOD_RES (9)..(9): Ser or Tyr
  MOD_RES (11)..(11): Ala or Gly
  MOD_RES (12)..(12): Phe, Ile, Leu or Met
  MOD_RES (14)..(14): Asp, Phe, Val or Tyr
CARXGGYGXYXXDXWGQ

SEQ ID NO: 370 - protein, 17 aa, Artificial Sequence
  Description of Artificial Sequence: Synthetic peptide
  MOD_RES (4)..(4): Asp or Gly
  MOD_RES (9)..(9): Ser or Tyr
  MOD_RES (11)..(11): Ala or Gly
  MOD_RES (12)..(12): Phe, Ile, Leu or Met
  MOD_RES (14)..(14): Asp, Phe, Val or Tyr
CARXGYGGXYXXDXWGQ

SEQ ID NO: 371 - protein, 17 aa, Artificial Sequence
  Description of Artificial Sequence: Synthetic peptide
  MOD_RES (4)..(4): Asp or Gly
  MOD_RES (9)..(9): Ser or Tyr
  MOD_RES (11)..(11): Ala or Gly
  MOD_RES (12)..(12): Phe, Ile, Leu or Met
  MOD_RES (14)..(14): Asp, Phe, Val or Tyr
CARXGGGGXYXXDXWGQ

SEQ ID NO: 372 - protein, 17 aa, Artificial Sequence
  Description of Artificial Sequence: Synthetic peptide
  MOD_RES (4)..(4): Asp or Gly
  MOD_RES (8)..(8): Ser or Tyr
  MOD_RES (11)..(11): Ala or Gly
  MOD_RES (12)..(12): Phe, Ile, Leu or Met
  MOD_RES (14)..(14): Asp, Phe, Val or Tyr
CARXGYYXGYXXDXWGQ

SEQ ID NO: 373 - protein, 17 aa, Artificial Sequence
  Description of Artificial Sequence: Synthetic peptide
  MOD_RES (4)..(4): Asp or Gly
  MOD_RES (8)..(8): Ser or Tyr
  MOD_RES (11)..(11): Ala or Gly
  MOD_RES (12)..(12): Phe, Ile, Leu or Met
  MOD_RES (14)..(14): Asp, Phe, Val or Tyr
CARXGGYXGYXXDXWGQ

SEQ ID NO: 374 - protein, 17 aa, Artificial Sequence
  Description of Artificial Sequence: Synthetic peptide
  MOD_RES (4)..(4): Asp or Gly
  MOD_RES (8)..(8): Ser or Tyr
  MOD_RES (11)..(11): Ala or Gly
  MOD_RES (12)..(12): Phe, Ile, Leu or Met
  MOD_RES (14)..(14): Asp, Phe, Val or Tyr
CARXGYGXGYXXDXWGQ

SEQ ID NO: 375 - protein, 17 aa, Artificial Sequence
  Description of Artificial Sequence: Synthetic peptide
  MOD_RES (4)..(4): Asp or Gly
  MOD_RES (8)..(8): Ser or Tyr
  MOD_RES (11)..(11): Ala or Gly
  MOD_RES (12)..(12): Phe, Ile, Leu or Met
  MOD_RES (14)..(14): Asp, Phe, Val or Tyr
CARXGGGXGYXXDXWGQ

SEQ ID NO: 376 - protein, 17 aa, Artificial Sequence
  Description of Artificial Sequence: Synthetic peptide
  MOD_RES (4)..(4): Asp or Gly
  MOD_RES (11)..(11): Ala or Gly
  MOD_RES (12)..(12): Phe, Ile, Leu or Met
  MOD_RES (14)..(14): Asp, Phe, Val or Tyr
CARXGYYGGYXXDXWGQ

SEQ ID NO: 377 - protein, 17 aa, Artificial Sequence
  Description of Artificial Sequence: Synthetic peptide
  MOD_RES (4)..(4): Asp or Gly
  MOD_RES (8)..(9): Ser or Tyr
  MOD_RES (12)..(12): Phe, Ile, Leu or Met
  MOD_RES (14)..(14): Asp, Phe, Val or Tyr
CARXGGYXXYYXDXWGQ

SEQ ID NO: 378 - protein, 17 aa, Artificial Sequence
  Description of Artificial Sequence: Synthetic peptide
  MOD_RES (4)..(4): Asp or Gly
  MOD_RES (11)..(11): Ala or Gly
  MOD_RES (12)..(12): Phe, Ile, Leu or Met
  MOD_RES (14)..(14): Asp, Phe, Val or Tyr
CARXGGYGGYXXDXWGQ

SEQ ID NO: 379 - protein, 17 aa, Artificial Sequence
  Description of Artificial Sequence: Synthetic peptide
  MOD_RES (4)..(4): Asp or Gly
  MOD_RES (11)..(11): Ala or Gly
  MOD_RES (12)..(12): Phe, Ile, Leu or Met
  MOD_RES (14)..(14): Asp, Phe, Val or Tyr
CARXGYGGGYXXDXWGQ

SEQ ID NO: 380 - protein, 17 aa, Artificial Sequence
  Description of Artificial Sequence: Synthetic peptide
  MOD_RES (4)..(4): Asp or Gly
  MOD_RES (11)..(11): Ala or Gly
  MOD_RES (12)..(12): Phe, Ile, Leu or Met
  MOD_RES (14)..(14): Asp, Phe, Val or Tyr
CARXGGGGGYXXDXWGQ

SEQ ID NO: 381 - protein, 17 aa, Artificial Sequence
  Description of Artificial Sequence: Synthetic peptide
  MOD_RES (4)..(4): Asp or Gly
  MOD_RES (8)..(9): Ser or Tyr
  MOD_RES (12)..(12): Phe, Ile, Leu or Met
  MOD_RES (14)..(14): Asp, Phe, Val or Tyr
CARXGYGXXYYXDXWGQ

SEQ ID NO: 382 - protein, 17 aa, Artificial Sequence
  Description of Artificial Sequence: Synthetic peptide
  MOD_RES (4)..(4): Asp or Gly
  MOD_RES (8)..(9): Ser or Tyr
  MOD_RES (12)..(12): Phe, Ile, Leu or Met
  MOD_RES (14)..(14): Asp, Phe, Val or Tyr
CARXGGGXXYYXDXWGQ

SEQ ID NO: 383 - protein, 17 aa, Artificial Sequence
  Description of Artificial Sequence: Synthetic peptide
  MOD_RES (4)..(4): Asp or Gly
  MOD_RES (9)..(9): Ser or Tyr
  MOD_RES (12)..(12): Phe, Ile, Leu or Met
  MOD_RES (14)..(14): Asp, Phe, Val or Tyr
CARXGYYGXYYXDXWGQ

SEQ ID NO: 384 - protein, 17 aa, Artificial Sequence
  Description of Artificial Sequence: Synthetic peptide
  MOD_RES (4)..(4): Asp or Gly
  MOD_RES (9)..(9): Ser or Tyr
  MOD_RES (12)..(12): Phe, Ile, Leu or Met
  MOD_RES (14)..(14): Asp, Phe, Val or Tyr
CARXGGYGXYYXDXWGQ

SEQ ID NO: 385 - protein, 17 aa, Artificial Sequence
  Description of Artificial Sequence: Synthetic peptide
  MOD_RES (4)..(4): Asp or Gly
  MOD_RES (9)..(9): Ser or Tyr
  MOD_RES (12)..(12): Phe, Ile, Leu or Met
  MOD_RES (14)..(14): Asp, Phe, Val or Tyr
CARXGYGGXYYXDXWGQ

SEQ ID NO: 386 - protein, 17 aa, Artificial Sequence
  Description of Artificial Sequence: Synthetic peptide
  MOD_RES (4)..(4): Asp or Gly
  MOD_RES (9)..(9): Ser or Tyr
  MOD_RES (12)..(12): Phe, Ile, Leu or Met
  MOD_RES (14)..(14): Asp, Phe, Val or Tyr
CARXGGGGXYYXDXWGQ

SEQ ID NO: 387 - protein, 17 aa, Artificial Sequence
  Description of Artificial Sequence: Synthetic peptide
  MOD_RES (4)..(4): Asp or Gly
  MOD_RES (8)..(8): Ser or Tyr
  MOD_RES (12)..(12): Phe, Ile, Leu or Met
  MOD_RES (14)..(14): Asp, Phe, Val or Tyr
CARXGYYXGYYXDXWGQ

SEQ ID NO: 388 - protein, 17 aa, Artificial Sequence
  Description of Artificial Sequence: Synthetic peptide
  MOD_RES (4)..(4): Asp or Gly
  MOD_RES (7)..(7): Ser or Tyr
  MOD_RES (10)..(10): Ser or Tyr
  MOD_RES (11)..(11): Ala, Asp, Ser or Tyr
  MOD_RES (12)..(12): Phe, Ile, Leu or Met
CARXGYXYGXXXDYWGQ

SEQ ID NO: 389 - protein, 17 aa, Artificial Sequence
  Description of Artificial Sequence: Synthetic peptide
  MOD_RES (4)..(4): Asp or Gly
  MOD_RES (7)..(7): Ser or Tyr
  MOD_RES (10)..(10): Ser or Tyr
  MOD_RES (11)..(11): Ala, Asp, Ser or Tyr
  MOD_RES (12)..(12): Phe, Ile, Leu or Met
CARXYGXYGXXXDYWGQ

SEQ ID NO: 390 - protein, 17 aa, Artificial Sequence
  Description of Artificial Sequence: Synthetic peptide
  MOD_RES (4)..(4): Asp or Gly
  MOD_RES (7)..(7): Ser or Tyr
  MOD_RES (10)..(10): Ser or Tyr
  MOD_RES (11)..(11): Ala, Asp, Ser or Tyr
  MOD_RES (12)..(12): Phe, Ile, Leu or Met
CARXGGXYGXXXDYWGQ

SEQ ID NO: 391 - protein, 17 aa, Artificial Sequence
  Description of Artificial Sequence: Synthetic peptide
  MOD_RES (4)..(4): Asp or Gly
  MOD_RES (7)..(7): Ser or Tyr
  MOD_RES (10)..(10): Ser or Tyr
  MOD_RES (11)..(11): Ala, Asp, Ser or Tyr
  MOD_RES (12)..(12): Phe, Ile, Leu or Met
CARXYYXGGXXXDYWGQ

SEQ ID NO: 392 - protein, 17 aa, Artificial Sequence
  Description of Artificial Sequence: Synthetic peptide
  MOD_RES (4)..(4): Asp or Gly
  MOD_RES (7)..(7): Ser or Tyr
  MOD_RES (10)..(10): Ser or Tyr
  MOD_RES (11)..(11): Ala, Asp, Ser or Tyr
  MOD_RES (12)..(12): Phe, Ile, Leu or Met
CARXGYXGGXXXDYWGQ

SEQ ID NO: 393 - protein, 17 aa, Artificial Sequence
  Description of Artificial Sequence: Synthetic peptide
  MOD_RES (4)..(4): Asp or Gly
  MOD_RES (7)..(7): Ser or Tyr
  MOD_RES (10)..(10): Ser or Tyr
  MOD_RES (11)..(11): Ala, Asp, Ser or Tyr
  MOD_RES (12)..(12): Phe, Ile, Leu or Met
CARXYGXGGXXXDYWGQ

SEQ ID NO: 394 - protein, 17 aa, Artificial Sequence
  Description of Artificial Sequence: Synthetic peptide
  MOD_RES (4)..(4): Asp or Gly
  MOD_RES (7)..(7): Ser or Tyr
  MOD_RES (10)..(10): Ser or Tyr
  MOD_RES (11)..(11): Ala, Asp, Ser or Tyr
  MOD_RES (12)..(12): Phe, Ile, Leu or Met
CARXGGXGGXXXDYWGQ

SEQ ID NO: 395 - protein, 17 aa, Artificial Sequence
  Description of Artificial Sequence: Synthetic peptide
  MOD_RES (4)..(4): Asp or Gly
  MOD_RES (7)..(7): Ser or Tyr
  MOD_RES (9)..(10): Ser or Tyr
  MOD_RES (11)..(11): Ala, Asp, Ser or Tyr
  MOD_RES (12)..(12): Phe, Ile, Leu or Met
CARXYYXYXXXXDYWGQ

SEQ ID NO: 396 - protein, 17 aa, Artificial Sequence
  Description of Artificial Sequence: Synthetic peptide
  MOD_RES (4)..(4): Asp or Gly
  MOD_RES (7)..(7): Ser or Tyr
  MOD_RES (9)..(10): Ser or Tyr
  MOD_RES (11)..(11): Ala, Asp, Ser or Tyr
  MOD_RES (12)..(12): Phe, Ile, Leu or Met
CARXGYXYXXXXDYWGQ

SEQ ID NO: 397 - protein, 17 aa, Artificial Sequence
  Description of Artificial Sequence: Synthetic peptide
  MOD_RES (4)..(4): Asp or Gly
  MOD_RES (7)..(7): Ser or Tyr
  MOD_RES (9)..(10): Ser or Tyr
  MOD_RES (11)..(11): Ala, Asp, Ser or Tyr
  MOD_RES (12)..(12): Phe, Ile, Leu or Met
CARXYGXYXXXXDYWGQ

SEQ ID NO: 398 - protein, 17 aa, Artificial Sequence
  Description of Artificial Sequence: Synthetic peptide
  MOD_RES (4)..(4): Asp or Gly
  MOD_RES (7)..(7): Ser or Tyr
  MOD_RES (9)..(10): Ser or Tyr
  MOD_RES (11)..(11): Ala, Asp, Ser or Tyr
  MOD_RES (12)..(12): Phe, Ile, Leu or Met
CARXGGXYXXXXDYWGQ

SEQ ID NO: 399 - protein, 17 aa, Artificial Sequence
  Description of Artificial Sequence: Synthetic peptide
  MOD_RES (4)..(4): Asp or Gly
  MOD_RES (7)..(7): Ser or Tyr
  MOD_RES (9)..(10): Ser or Tyr
  MOD_RES (11)..(11): Ala, Asp, Ser or Tyr
  MOD_RES (12)..(12): Phe, Ile, Leu or Met
CARXYYXGXXXXDYWGQ

SEQ ID NO: 400 - protein, 17 aa, Artificial Sequence
  Description of Artificial Sequence: Synthetic peptide
  MOD_RES (4)..(4): Asp or Gly
  MOD_RES (7)..(7): Ser or Tyr
  MOD_RES (9)..(10): Ser or Tyr
  MOD_RES (11)..(11): Ala, Asp, Ser or Tyr
  MOD_RES (12)..(12): Phe, Ile, Leu or Met
CARXGYXGXXXXDYWGQ

SEQ ID NO: 401 - protein, 17 aa, Artificial Sequence
  Description of Artificial Sequence: Synthetic peptide
  MOD_RES (4)..(4): Asp or Gly
  MOD_RES (7)..(7): Ser or Tyr
  MOD_RES (9)..(10): Ser or Tyr
  MOD_RES (11)..(11): Ala, Asp, Ser or Tyr
  MOD_RES (12)..(12): Phe, Ile, Leu or Met
CARXYGXGXXXXDYWGQ

SEQ ID NO: 402 - protein, 17 aa, Artificial Sequence
  Description of Artificial Sequence: Synthetic peptide
  MOD_RES (4)..(4): Asp or Gly
  MOD_RES (7)..(7): Ser or Tyr
  MOD_RES (9)..(10): Ser or Tyr
  MOD_RES (11)..(11): Ala, Asp, Ser or Tyr
  MOD_RES (12)..(12): Phe, Ile, Leu or Met
CARXGGXGXXXXDYWGQ

SEQ ID NO: 403 - protein, 17 aa, Artificial Sequence
  Description of Artificial Sequence: Synthetic peptide
  MOD_RES (4)..(4): Asp or Gly
  MOD_RES (7)..(7): Ser or Tyr
  MOD_RES (10)..(10): Ser or Tyr
  MOD_RES (11)..(11): Ala, Asp, Ser or Tyr
  MOD_RES (12)..(12): Phe, Ile, Leu or Met
CARXYYXYGXXXDYWGQ

SEQ ID NO: 404 - protein, 17 aa, Artificial Sequence
  Description of Artificial Sequence: Synthetic peptide
  MOD_RES (4)..(4): Asp or Gly
  MOD_RES (7)..(7): Ser or Tyr
  MOD_RES (9)..(9): Ser or Tyr
  MOD_RES (11)..(11): Ala or Gly
  MOD_RES (12)..(12): Phe, Ile, Leu or Met
  MOD_RES (14)..(14): Asp, Phe, Val or Tyr
CARXGYXYXYXXDXWGQ

SEQ ID NO: 405 - protein, 17 aa, Artificial Sequence
  Description of Artificial Sequence: Synthetic peptide
  MOD_RES (4)..(4): Asp or Gly
  MOD_RES (7)..(7): Ser or Tyr
  MOD_RES (9)..(9): Ser or Tyr
  MOD_RES (11)..(11): Ala or Gly
  MOD_RES (12)..(12): Phe, Ile, Leu or Met
  MOD_RES (14)..(14): Asp, Phe, Val or Tyr
CARXYGXYXYXXDXWGQ

SEQ ID NO: 406 - protein, 17 aa, Artificial Sequence
  Description of Artificial Sequence: Synthetic peptide
  MOD_RES (4)..(4): Asp or Gly
  MOD_RES (7)..(7): Ser or Tyr
  MOD_RES (9)..(9): Ser or Tyr
  MOD_RES (11)..(11): Ala or Gly
  MOD_RES (12)..(12): Phe, Ile, Leu or Met
  MOD_RES (14)..(14): Asp, Phe, Val or Tyr
CARXGGXYXYXXDXWGQ

SEQ ID NO: 407 - protein, 17 aa, Artificial Sequence
  Description of Artificial Sequence: Synthetic peptide
  MOD_RES (4)..(4): Asp or Gly
  MOD_RES (7)..(7): Ser or Tyr
  MOD_RES (9)..(9): Ser or Tyr
  MOD_RES (11)..(11): Ala or Gly
  MOD_RES (12)..(12): Phe, Ile, Leu or Met
  MOD_RES (14)..(14): Asp, Phe, Val or Tyr
CARXYYXGXYXXDXWGQ

SEQ ID NO: 408 - protein, 17 aa, Artificial Sequence
  Description of Artificial Sequence: Synthetic peptide
  MOD_RES (4)..(4): Asp or Gly
  MOD_RES (7)..(7): Ser or Tyr
  MOD_RES (9)..(9): Ser or Tyr
  MOD_RES (11)..(11): Ala or Gly
  MOD_RES (12)..(12): Phe, Ile, Leu or Met
  MOD_RES (14)..(14): Asp, Phe, Val or Tyr
CARXGYXGXYXXDXWGQ

SEQ ID NO: 409 - protein, 17 aa, Artificial Sequence
  Description of Artificial Sequence: Synthetic peptide
  MOD_RES (4)..(4): Asp or Gly
  MOD_RES (7)..(7): Ser or Tyr
  MOD_RES (9)..(9): Ser or Tyr
  MOD_RES (11)..(11): Ala or Gly
  MOD_RES (12)..(12): Phe, Ile, Leu or Met
  MOD_RES (14)..(14): Asp, Phe, Val or Tyr
CARXYGXGXYXXDXWGQ

SEQ ID NO: 410 - protein, 17 aa, Artificial Sequence
  Description of Artificial Sequence: Synthetic peptide
  MOD_RES (4)..(4): Asp or Gly
  MOD_RES (7)..(7): Ser or Tyr
  MOD_RES (9)..(9): Ser or Tyr
  MOD_RES (11)..(11): Ala or Gly
  MOD_RES (12)..(12): Phe, Ile, Leu or Met
  MOD_RES (14)..(14): Asp, Phe, Val or Tyr
CARXGGXGXYXXDXWGQ

SEQ ID NO: 411 - protein, 17 aa, Artificial Sequence
  Description of Artificial Sequence: Synthetic peptide
  MOD_RES (4)..(4): Asp or Gly
  MOD_RES (7)..(7): Ser or Tyr
  MOD_RES (9)..(9): Ser or Tyr
  MOD_RES (12)..(12): Phe, Ile, Leu or Met
  MOD_RES (14)..(14): Asp, Phe, Val or Tyr
CARXYYXYXYYXDXWGQ

SEQ ID NO: 412 - protein, 17 aa, Artificial Sequence
  Description of Artificial Sequence: Synthetic peptide
  MOD_RES (4)..(4): Asp or Gly
  MOD_RES (7)..(7): Ser or Tyr
  MOD_RES (9)..(9): Ser or Tyr
  MOD_RES (12)..(12): Phe, Ile, Leu or Met
  MOD_RES (14)..(14): Asp, Phe, Val or Tyr
CARXGYXYXYYXDXWGQ

SEQ ID NO: 413 - protein, 17 aa, Artificial Sequence
  Description of Artificial Sequence: Synthetic peptide
  MOD_RES (4)..(4): Asp or Gly
  MOD_RES (7)..(7): Ser or Tyr
  MOD_RES (9)..(9): Ser or Tyr
  MOD_RES (12)..(12): Phe, Ile, Leu or Met
  MOD_RES (14)..(14): Asp, Phe, Val or Tyr
CARXYGXYXYYXDXWGQ

SEQ ID NO: 414 - protein, 17 aa, Artificial Sequence
  Description of Artificial Sequence: Synthetic peptide
  MOD_RES (4)..(4): Asp or Gly
  MOD_RES (7)..(7): Ser or Tyr
  MOD_RES (9)..(9): Ser or Tyr
  MOD_RES (12)..(12): Phe, Ile, Leu or Met
  MOD_RES (14)..(14): Asp, Phe, Val or Tyr
CARXGGXYXYYXDXWGQ

SEQ ID NO: 415 - protein, 17 aa, Artificial Sequence
  Description of Artificial Sequence: Synthetic peptide
  MOD_RES (4)..(4): Asp or Gly
  MOD_RES (7)..(7): Ser or Tyr
  MOD_RES (9)..(9): Ser or Tyr
  MOD_RES (12)..(12): Phe, Ile, Leu or Met
  MOD_RES (14)..(14): Asp, Phe, Val or Tyr
CARXYYXGXYYXDXWGQ

SEQ ID NO: 416 - protein, 17 aa, Artificial Sequence
  Description of Artificial Sequence: Synthetic peptide
  MOD_RES (4)..(4): Asp or Gly
  MOD_RES (7)..(7): Ser or Tyr
  MOD_RES (9)..(9): Ser or Tyr
  MOD_RES (12)..(12): Phe, Ile, Leu or Met
  MOD_RES (14)..(14): Asp, Phe, Val or Tyr
CARXGYXGXYYXDXWGQ

SEQ ID NO: 417 - protein, 17 aa, Artificial Sequence
  Description of Artificial Sequence: Synthetic peptide
  MOD_RES (4)..(4): Asp or Gly
  MOD_RES (7)..(7): Ser or Tyr
  MOD_RES (9)..(9): Ser or Tyr
  MOD_RES (12)..(12): Phe, Ile, Leu or Met
  MOD_RES (14)..(14): Asp, Phe, Val or Tyr
CARXYGXGXYYXDXWGQ

SEQ ID NO: 418 - protein, 17 aa, Artificial Sequence
  Description of Artificial Sequence: Synthetic peptide
  MOD_RES (4)..(4): Asp or Gly
  MOD_RES (7)..(7): Ser or Tyr
  MOD_RES (9)..(9): Ser or Tyr
  MOD_RES (12)..(12): Phe, Ile, Leu or Met
  MOD_RES (14)..(14): Asp, Phe, Val or Tyr
CARXGGXGXYYXDXWGQ

SEQ ID NO: 419 - protein, 17 aa, Artificial Sequence
  Description of Artificial Sequence: Synthetic peptide
  MOD_RES (4)..(4): Asp or Gly
  MOD_RES (7)..(7): Ser or Tyr
  MOD_RES (9)..(9): Ser or Tyr
  MOD_RES (11)..(11): Ala or Gly
  MOD_RES (12)..(12): Phe, Ile, Leu or Met
  MOD_RES (14)..(14): Asp, Phe, Val or Tyr
CARXYYXYXYXXDXWGQ

SEQ ID NO: 420 - protein, 17 aa, Artificial Sequence
  Description of Artificial Sequence: Synthetic peptide
  MOD_RES (5)..(5): Asp or Gly
  MOD_RES (6)..(6): Ser or Tyr
  MOD_RES (9)..(10): Ser or Tyr
  MOD_RES (11)..(11): Ala, Asp, Ser or Tyr
  MOD_RES (12)..(12): Phe, Ile, Leu or Met
  MOD_RES (14)..(14): Asp, Phe, Val or Tyr
CARDXXYYXXXXDXWGQ

SEQ ID NO: 421 - protein, 17 aa, Artificial Sequence
  Description of Artificial Sequence: Synthetic peptide
  MOD_RES (5)..(5): Asp or Gly
  MOD_RES (6)..(6): Ser or Tyr
  MOD_RES (9)..(10): Ser or Tyr
  MOD_RES (11)..(11): Ala, Asp, Ser or Tyr
  MOD_RES (12)..(12): Phe, Ile, Leu or Met
  MOD_RES (14)..(14): Asp, Phe, Val or Tyr
CARDXXGYXXXXDXWGQ

SEQ ID NO: 422 - protein, 17 aa, Artificial Sequence
  Description of Artificial Sequence: Synthetic peptide
  MOD_RES (5)..(5): Asp or Gly
  MOD_RES (6)..(6): Ser or Tyr
  MOD_RES (9)..(10): Ser or Tyr
  MOD_RES (11)..(11): Ala, Asp, Ser or Tyr
  MOD_RES (12)..(12): Phe, Ile, Leu or Met
  MOD_RES (14)..(14): Asp, Phe, Val or Tyr
CARDXXYGXXXXDXWGQ

SEQ ID NO: 423 - protein, 17 aa, Artificial Sequence
  Description of Artificial Sequence: Synthetic peptide
  MOD_RES (5)..(5): Asp or Gly
  MOD_RES (6)..(6): Ser or Tyr
  MOD_RES (9)..(10): Ser or Tyr
  MOD_RES (11)..(11): Ala, Asp, Ser or Tyr
  MOD_RES (12)..(12): Phe, Ile, Leu or Met
  MOD_RES (14)..(14): Asp, Phe, Val or Tyr
CARDXXGGXXXXDXWGQ

SEQ ID NO: 424 - protein, 17 aa, Artificial Sequence
  Description of Artificial Sequence: Synthetic peptide
  MOD_RES (4)..(4): Asp, Gly, Asn or Ser
  MOD_RES (5)..(5): His or Tyr
  MOD_RES (6)..(6): Ser or Tyr
  MOD_RES (8)..(10): Ser or Tyr
  MOD_RES (11)..(11): Ala, Asp, Ser or Tyr
  MOD_RES (12)..(12): Phe, Ile, Leu or Met
CARXXXYXXXXXDYWGQ

SEQ ID NO: 425 - protein, 17 aa, Artificial Sequence
  Description of Artificial Sequence: Synthetic peptide
  MOD_RES (4)..(4): Asp, Gly, Asn or Ser
  MOD_RES (5)..(5): His or Tyr
  MOD_RES (6)..(6): Ser or Tyr
  MOD_RES (9)..(10): Ser or Tyr
  MOD_RES (11)..(11): Ala, Asp, Ser or Tyr
  MOD_RES (12)..(12): Phe, Ile, Leu or Met
CARXXXYGXXXXDYWGQ

SEQ ID NO: 426 - protein, 17 aa, Artificial Sequence
  Description of Artificial Sequence: Synthetic peptide
  MOD_RES (4)..(4): Asp, Gly, Asn or Ser
  MOD_RES (5)..(5): His or Tyr
  MOD_RES (6)..(6): Ser or Tyr
  MOD_RES (8)..(8): Ser or Tyr
  MOD_RES (10)..(10): Ser or Tyr
  MOD_RES (11)..(11): Ala, Asp, Ser or Tyr
  MOD_RES (12)..(12): Phe, Ile, Leu or Met
CARXXXYXGXXXDYWGQ

SEQ ID NO: 427 - protein, 17 aa, Artificial Sequence
  Description of Artificial Sequence: Synthetic peptide
  MOD_RES (4)..(4): Asp, Gly, Asn or Ser
  MOD_RES (5)..(5): His or Tyr
  MOD_RES (6)..(6): Ser or Tyr
  MOD_RES (10)..(10): Ser or Tyr
  MOD_RES (11)..(11): Ala, Asp, Ser or Tyr
  MOD_RES (12)..(12): Phe, Ile, Leu or Met
CARXXXYGGXXXDYWGQ

SEQ ID NO: 428 - protein, 17 aa, Artificial Sequence
  Description of Artificial Sequence: Synthetic peptide
  MOD_RES (5)..(5): Asn, Ser, Thr or Tyr
  MOD_RES (7)..(8): Ser or Tyr
  MOD_RES (9)..(9): Asp, Gly, Asn or Ser
  MOD_RES (10)..(10): Ser or Tyr
  MOD_RES (12)..(12): Phe, Ile, Leu or Met
CARYXYXXXXYXDYWGQ

SEQ ID NO: 429 - protein, 17 aa, Artificial Sequence
  Description of Artificial Sequence: Synthetic peptide
  MOD_RES (5)..(5): Asn, Ser, Thr or Tyr
  MOD_RES (7)..(8): Ser or Tyr
  MOD_RES (9)..(9): Asp, Gly, Asn or Ser
  MOD_RES (10)..(10): Ser or Tyr
  MOD_RES (12)..(12): Phe, Ile, Leu or Met
CARGXYXXXXYXDYWGQ

SEQ ID NO: 430 - protein, 17 aa, Artificial Sequence
  Description of Artificial Sequence: Synthetic peptide
  MOD_RES (5)..(5): Asn, Ser, Thr or Tyr
  MOD_RES (7)..(7): Asp or Gly
  MOD_RES (8)..(8): Ser or Tyr
  MOD_RES (9)..(9): Asp, Gly, Asn or Ser
  MOD_RES (10)..(10): Ser or Tyr
  MOD_RES (12)..(12): Phe, Ile, Leu or Met
CARYXYXXXXYXDYWGQ

SEQ ID NO: 431 - protein, 17 aa, Artificial Sequence
  Description of Artificial Sequence: Synthetic peptide
  MOD_RES (5)..(5): Asn, Ser, Thr or Tyr
  MOD_RES (7)..(7): Asp or Gly
  MOD_RES (8)..(8): Ser or Tyr
  MOD_RES (9)..(9): Asp, Gly, Asn or Ser
  MOD_RES (10)..(10): Ser or Tyr
  MOD_RES (12)..(12): Phe, Ile, Leu or Met
CARGXYXXXXYXDYWGQ

SEQ ID NO: 432 - protein, 17 aa, Artificial Sequence
  Description of Artificial Sequence: Synthetic peptide
  MOD_RES (5)..(5): Asn, Ser, Thr or Tyr
  MOD_RES (7)..(7): Ser or Tyr
  MOD_RES (9)..(9): Asp, Gly, Asn or Ser
  MOD_RES (10)..(10): Ser or Tyr
  MOD_RES (12)..(12): Phe, Ile, Leu or Met
CARYXYXGXXYXDYWGQ

SEQ ID NO: 433 - protein, 17 aa, Artificial Sequence
  Description of Artificial Sequence: Synthetic peptide
  MOD_RES (5)..(5): Asn, Ser, Thr or Tyr
  MOD_RES (7)..(7): Ser or Tyr
  MOD_RES (9)..(9): Asp, Gly, Asn or Ser
  MOD_RES (10)..(10): Ser or Tyr
  MOD_RES (12)..(12): Phe, Ile, Leu or Met
CARGXYXGXXYXDYWGQ

SEQ ID NO: 434 - protein, 17 aa, Artificial Sequence
  Description of Artificial Sequence: Synthetic peptide
  MOD_RES (5)..(5): Asn, Ser, Thr or Tyr
  MOD_RES (7)..(7): Asp or Gly
  MOD_RES (9)..(9): Asp, Gly, Asn or Ser
  MOD_RES (10)..(10): Ser or Tyr
  MOD_RES (12)..(12): Phe, Ile, Leu or Met
CARYXYXGXXYXDYWGQ

SEQ ID NO: 435 - protein, 17 aa, Artificial Sequence
  Description of Artificial Sequence: Synthetic peptide
  MOD_RES (5)..(5): Asn, Ser, Thr or Tyr
  MOD_RES (7)..(7): Asp or Gly
  MOD_RES (9)..(9): Asp, Gly, Asn or Ser
  MOD_RES (10)..(10): Ser or Tyr
  MOD_RES (12)..(12): Phe, Ile, Leu or Met
CARGXYXGXXYXDYWGQ

SEQ ID NO: 436 - protein, 17 aa, Artificial Sequence
  Description of Artificial Sequence: Synthetic peptide
  MOD_RES (5)..(5): Asp, Gly, His or Arg
  MOD_RES (6)..(6): Asp, Gly, Asn or Ser
  MOD_RES (10)..(10): Ala, Ser, Asp, Glu or Tyr
  MOD_RES (11)..(11): Ala, Asp, Ser or Tyr
  MOD_RES (12)..(12): Phe, Ile, Leu or Met
  MOD_RES (13)..(13): Ala or Asp
CARDXXGYYXXXXYWGQ

SEQ ID NO: 437 - protein, 17 aa, Artificial Sequence
  Description of Artificial Sequence: Synthetic peptide
  MOD_RES (4)..(4): Ala, Glu, Gly, Pro, Gln or Arg
  MOD_RES (5)..(5): Leu or Val
  MOD_RES (6)..(6): Asp, Phe, His, Leu, Val or Tyr
  MOD_RES (7)..(7): Gly or Arg
  MOD_RES (8)..(8): Ala, Gly, Leu, Pro, Arg or Val
  MOD_RES (11)..(11): Ala, Asp, Asn, Ser, Thr or Tyr
  MOD_RES (12)..(12): Phe, Ile, Leu or Met
CARXXXXXGYXXDYWGQ

SEQ ID NO: 438 - protein, 17 aa, Artificial Sequence
  Description of Artificial Sequence: Synthetic peptide
  MOD_RES (4)..(4): Asp or Gly
  MOD_RES (5)..(5): Asp, Gly, His or Arg
  MOD_RES (6)..(6): Gly or Ser
  MOD_RES (9)..(9): Phe, Ser or Tyr
  MOD_RES (11)..(11): Ala, Asp or Gly
  MOD_RES (12)..(12): Phe, Ile, Leu or Met
  MOD_RES (14)..(14): Asp, Phe, Val or Tyr
CARXXXYYXYXXDXWGQ

SEQ ID NO: 439 - protein, 18 aa, Artificial Sequence
  Description of Artificial Sequence: Synthetic peptide
  MOD_RES (5)..(5): Gly or Arg
  MOD_RES (8)..(8): Ser or Tyr
  MOD_RES (10)..(10): Ser or Tyr
  MOD_RES (12)..(12): Ala or Gly
  MOD_RES (13)..(13): Phe, Ile, Leu or Met
  MOD_RES (15)..(15): Asp, Phe, Val or Tyr
CARDXYGXYXYXXDXWGQ

SEQ ID NO: 440 - protein, 18 aa, Artificial Sequence
  Description of Artificial Sequence: Synthetic peptide
  MOD_RES (5)..(5): Gly or Arg
  MOD_RES (10)..(10): Ser or Tyr
  MOD_RES (12)..(12): Ala or Gly
  MOD_RES (13)..(13): Phe, Ile, Leu or Met
  MOD_RES (15)..(15): Asp, Phe, Val or Tyr
CARDXYYGYXYXXDXWGQ

SEQ ID NO: 441 - protein, 18 aa, Artificial Sequence
  Description of Artificial Sequence: Synthetic peptide
  MOD_RES (5)..(5): Gly or Arg
  MOD_RES (10)..(10): Ser or Tyr
  MOD_RES (12)..(12): Ala or Gly
  MOD_RES (13)..(13): Phe, Ile, Leu or Met
  MOD_RES (15)..(15): Asp, Phe, Val or Tyr
CARDXYGGYXYXXDXWGQ

SEQ ID NO: 442 - protein, 18 aa, Artificial Sequence
  Description of Artificial Sequence: Synthetic peptide
  MOD_RES (5)..(5): Gly or Arg
  MOD_RES (8)..(8): Ser or Tyr
  MOD_RES (10)..(10): Ser or Tyr
  MOD_RES (12)..(12): Ala or Gly
  MOD_RES (13)..(13): Phe, Ile, Leu or Met
  MOD_RES (15)..(15): Asp, Phe, Val or Tyr
CARDXYYXGXYXXDXWGQ

SEQ ID NO: 443 - protein, 18 aa, Artificial Sequence
  Description of Artificial Sequence: Synthetic peptide
  MOD_RES (5)..(5): Gly or Arg
  MOD_RES (8)..(8): Ser or Tyr
  MOD_RES (10)..(10): Ser or Tyr
  MOD_RES (12)..(12): Ala or Gly
  MOD_RES (13)..(13): Phe, Ile, Leu or Met
  MOD_RES (15)..(15): Asp, Phe, Val or Tyr
CARDXYGXGXYXXDXWGQ

SEQ ID NO: 444 - protein, 18 aa, Artificial Sequence
  Description of Artificial Sequence: Synthetic peptide
  MOD_RES (5)..(5): Gly or Arg
  MOD_RES (10)..(10): Ser or Tyr
  MOD_RES (12)..(12): Ala or Gly
  MOD_RES (13)..(13): Phe, Ile, Leu or Met
  MOD_RES (15)..(15): Asp, Phe, Val or Tyr
CARDXYYGGXYXXDXWGQ

SEQ ID NO: 445 - protein, 18 aa, Artificial Sequence
  Description of Artificial Sequence: Synthetic peptide
  MOD_RES (5)..(5): Gly or Arg
  MOD_RES (10)..(10): Ser or Tyr
  MOD_RES (12)..(12): Ala or Gly
  MOD_RES (13)..(13): Phe, Ile, Leu or Met
  MOD_RES (15)..(15): Asp, Phe, Val or Tyr
CARDXYGGGXYXXDXWGQ

SEQ ID NO: 446 - protein, 18 aa, Artificial Sequence
  Description of Artificial Sequence: Synthetic peptide
  MOD_RES (5)..(5): Gly or Arg
  MOD_RES (8)..(8): Ser or Tyr
  MOD_RES (10)..(10): Ser or Tyr
  MOD_RES (13)..(13): Phe, Ile, Leu or Met
  MOD_RES (15)..(15): Asp, Phe, Val or Tyr
CARDXYYXYXYYXDXWGQ

SEQ ID NO: 447 - protein, 18 aa, Artificial Sequence
  Description of Artificial Sequence: Synthetic peptide
  MOD_RES (5)..(5): Gly or Arg
  MOD_RES (8)..(8): Ser or Tyr
  MOD_RES (10)..(10): Ser or Tyr
  MOD_RES (13)..(13): Phe, Ile, Leu or Met
  MOD_RES (15)..(15): Asp, Phe, Val or Tyr
CARDXYGXYXYYXDXWGQ

SEQ ID NO: 448 - protein, 18 aa, Artificial Sequence
  Description of Artificial Sequence: Synthetic peptide
  MOD_RES (5)..(5): Gly or Arg
  MOD_RES (10)..(10): Ser or Tyr
  MOD_RES (13)..(13): Phe, Ile, Leu or Met
  MOD_RES (15)..(15): Asp, Phe, Val or Tyr
CARDXYYGYXYYXDXWGQ

SEQ ID NO: 449 - protein, 18 aa, Artificial Sequence
  Description of Artificial Sequence: Synthetic peptide
  MOD_RES (5)..(5): Gly or Arg
  MOD_RES (10)..(10): Ser or Tyr
  MOD_RES (13)..(13): Phe, Ile, Leu or Met
  MOD_RES (15)..(15): Asp, Phe, Val or Tyr
CARDXYGGYXYYXDXWGQ

SEQ ID NO: 450 - protein, 18 aa, Artificial Sequence
  Description of Artificial Sequence: Synthetic peptide
  MOD_RES (5)..(5): Gly or Arg
  MOD_RES (8)..(8): Ser or Tyr
  MOD_RES (10)..(10): Ser or Tyr
  MOD_RES (13)..(13): Phe, Ile, Leu or Met
  MOD_RES (15)..(15): Asp, Phe, Val or Tyr
CARDXYYXGXYYXDXWGQ

SEQ ID NO: 451 - protein, 18 aa, Artificial Sequence
  Description of Artificial Sequence: Synthetic peptide
  MOD_RES (5)..(5): Gly or Arg
  MOD_RES (8)..(8): Ser or Tyr
  MOD_RES (10)..(10): Ser or Tyr
  MOD_RES (13)..(13): Phe, Ile, Leu or Met
  MOD_RES (15)..(15): Asp, Phe, Val or Tyr
CARDXYGXGXYYXDXWGQ

SEQ ID NO: 452 - protein, 18 aa, Artificial Sequence
  Description of Artificial Sequence: Synthetic peptide
  MOD_RES (5)..(5): Gly or Arg
  MOD_RES (10)..(10): Ser or Tyr
  MOD_RES (13)..(13): Phe, Ile, Leu or Met
  MOD_RES (15)..(15): Asp, Phe, Val or Tyr
CARDXYYGGXYYXDXWGQ

SEQ ID NO: 453 - protein, 18 aa, Artificial Sequence
  Description of Artificial Sequence: Synthetic peptide
  MOD_RES (5)..(5): Gly or Arg
  MOD_RES (10)..(10): Ser or Tyr
  MOD_RES (13)..(13): Phe, Ile, Leu or Met
  MOD_RES (15)..(15): Asp, Phe, Val or Tyr
CARDXYGGGXYYXDXWGQ

SEQ ID NO: 454 - protein, 18 aa, Artificial Sequence
  Description of Artificial Sequence: Synthetic peptide
  MOD_RES (5)..(5): Gly or Arg
  MOD_RES (8)..(8): Ser or Tyr
  MOD_RES (10)..(10): Ser or Tyr
  MOD_RES (12)..(12): Ala or Gly
  MOD_RES (13)..(13): Phe, Ile, Leu or Met
  MOD_RES (15)..(15): Asp, Phe, Val or Tyr
CARDXYYXYXYXXDXWGQ

SEQ ID NO: 455 - protein, 18 aa, Artificial Sequence
  Description of Artificial Sequence: Synthetic peptide
  MOD_RES (4)..(4): Asp, Gly, Asn or Ser
  MOD_RES (5)..(5): Pro or Arg
  MOD_RES (7)..(7): Ser or Tyr
  MOD_RES (9)..(10): Gly or Ser
  MOD_RES (11)..(11): Ser or Tyr
CARXXYXYXXXYFDYWGQ

SEQ ID NO: 456 - protein, 18 aa, Artificial Sequence
  Description of Artificial Sequence: Synthetic peptide
  MOD_RES (4)..(4): Asp, Gly, Asn or Ser
  MOD_RES (5)..(5): Pro or Arg
  MOD_RES (9)..(10): Gly or Ser
  MOD_RES (11)..(11): Ser or Tyr
CARXXYGYXXXYFDYWGQ

SEQ ID NO: 457 - protein, 18 aa, Artificial Sequence
  Description of Artificial Sequence: Synthetic peptide
  MOD_RES (4)..(4): Asp, Gly, Asn or Ser
  MOD_RES (5)..(5): Pro or Arg
  MOD_RES (7)..(7): Ser or Tyr
  MOD_RES (9)..(10): Gly or Ser
  MOD_RES (11)..(11): Ser or Tyr
CARXXYXGXXXYFDYWGQ

SEQ ID NO: 458 - protein, 18 aa, Artificial Sequence
  Description of Artificial Sequence: Synthetic peptide
  MOD_RES (4)..(4): Asp, Gly, Asn or Ser
  MOD_RES (5)..(5): Pro or Arg
  MOD_RES (9)..(10): Gly or Ser
  MOD_RES (11)..(11): Ser or Tyr
CARXXYGGXXXYFDYWGQ

SEQ ID NO: 459 - protein, 18 aa, Artificial Sequence
  Description of Artificial Sequence: Synthetic peptide
  MOD_RES (4)..(4): Asp, Gly, Asn or Ser
  MOD_RES (5)..(5): Pro or Arg
  MOD_RES (7)..(7): Ser or Tyr
  MOD_RES (9)..(10): Gly or Ser
  MOD_RES (11)..(11): Ser or Tyr
  MOD_RES (12)..(12): Ala or Gly
CARXXYXYXXXXFDYWGQ

SEQ ID NO: 460 - protein, 18 aa, Artificial Sequence
  Description of Artificial Sequence: Synthetic peptide
  MOD_RES (4)..(4): Asp, Gly, Asn or Ser
  MOD_RES (5)..(5): Pro or Arg
  MOD_RES (9)..(10): Gly or Ser
  MOD_RES (11)..(11): Ser or Tyr
  MOD_RES (12)..(12): Ala or Gly
CARXXYGYXXXXFDYWGQ

SEQ ID NO: 461 - protein, 18 aa, Artificial Sequence
  Description of Artificial Sequence: Synthetic peptide
  MOD_RES (4)..(4): Asp, Gly, Asn or Ser
  MOD_RES (5)..(5): Pro or Arg
  MOD_RES (7)..(7): Ser or Tyr
  MOD_RES (9)..(10): Gly or Ser
  MOD_RES (11)..(11): Ser or Tyr
  MOD_RES (12)..(12): Ala or Gly
CARXXYXGXXXXFDYWGQ

SEQ ID NO: 462 - protein, 18 aa, Artificial Sequence
  Description of Artificial Sequence: Synthetic peptide
  MOD_RES (4)..(4): Asp, Gly, Asn or Ser
  MOD_RES (5)..(5): Pro or Arg
  MOD_RES (9)..(10): Gly or Ser
  MOD_RES (11)..(11): Ser or Tyr
  MOD_RES (12)..(12): Ala or Gly
CARXXYGGXXXXFDYWGQ

SEQ ID NO: 463 - protein, 18 aa, Artificial Sequence
  Description of Artificial Sequence: Synthetic peptide
  MOD_RES (4)..(4): Gly, Asp or Glu
  MOD_RES (5)..(5): Ala, Gly, Pro or Arg
  MOD_RES (8)..(10): Ser or Tyr
  MOD_RES (12)..(12): Ala, Asp, Ser or Tyr
  MOD_RES (13)..(13): Phe, Ile, Leu or Met
CARXXYYXXXYXXDYWGQ

SEQ ID NO: 464 - protein, 18 aa, Artificial Sequence
  Description of Artificial Sequence: Synthetic peptide
  MOD_RES (4)..(4): Gly, Asp or Glu
  MOD_RES (5)..(5): Ala, Gly, Pro or Arg
  MOD_RES (9)..(10): Ser or Tyr
  MOD_RES (12)..(12): Ala, Asp, Ser or Tyr
  MOD_RES (13)..(13): Phe, Ile, Leu or Met
CARXXYYGXXYXXDYWGQ

SEQ ID NO: 465 - protein, 18 aa, Artificial Sequence
  Description of Artificial Sequence: Synthetic peptide
  MOD_RES (4)..(4): Gly, Asp or Glu
  MOD_RES (5)..(5): Ala, Gly, Pro or Arg
  MOD_RES (8)..(8): Ser or Tyr
  MOD_RES (10)..(10): Ser or Tyr
  MOD_RES (12)..(12): Ala, Asp, Ser or Tyr
  MOD_RES (13)..(13): Phe, Ile, Leu or Met
CARXXYYXGXYXXDYWGQ

SEQ ID NO: 466 - protein, 18 aa, Artificial Sequence
  Description of Artificial Sequence: Synthetic peptide
  MOD_RES (4)..(4): Gly, Asp or Glu
  MOD_RES (5)..(5): Ala, Gly, Pro or Arg
  MOD_RES (10)..(10): Ser or Tyr
  MOD_RES (12)..(12): Ala, Asp, Ser or Tyr
  MOD_RES (13)..(13): Phe, Ile, Leu or Met
CARXXYYGGXYXXDYWGQ

SEQ ID NO: 467 - protein, 18 aa, Artificial Sequence
  Description of Artificial Sequence: Synthetic peptide
  MOD_RES (4)..(4): Gly, Asp or Glu
  MOD_RES (5)..(5): Ala, Gly, Pro or Arg
  MOD_RES (8)..(9): Ser or Tyr
  MOD_RES (12)..(12): Ala, Asp, Ser or Tyr
  MOD_RES (13)..(13): Phe, Ile, Leu or Met
CARXXYYXXGYXXDYWGQ

SEQ ID NO: 468 - protein, 18 aa, Artificial Sequence
  Description of Artificial Sequence: Synthetic peptide
  MOD_RES (4)..(4): Gly, Asp or Glu
  MOD_RES (5)..(5): Ala, Gly, Pro or Arg
  MOD_RES (9)..(9): Ser or Tyr
  MOD_RES (12)..(12): Ala, Asp, Ser or Tyr
  MOD_RES (13)..(13): Phe, Ile, Leu or Met
CARXXYYGXGYXXDYWGQ

SEQ ID NO: 469 - protein, 18 aa, Artificial Sequence
  Description of Artificial Sequence: Synthetic peptide
  MOD_RES (4)..(4): Gly, Asp or Glu
  MOD_RES (5)..(5): Ala, Gly, Pro or Arg
  MOD_RES (8)..(8): Ser or Tyr
  MOD_RES (12)..(12): Ala, Asp, Ser or Tyr
  MOD_RES (13)..(13): Phe, Ile, Leu or Met
CARXXYYXGGYXXDYWGQ

SEQ ID NO: 470 - protein, 18 aa, Artificial Sequence
  Description of Artificial Sequence: Synthetic peptide
  MOD_RES (4)..(4): Gly, Asp or Glu
  MOD_RES (5)..(5): Ala, Gly, Pro or Arg
  MOD_RES (12)..(12): Ala, Asp, Ser or Tyr
  MOD_RES (13)..(13): Phe, Ile, Leu or Met
CARXXYYGGGYXXDYWGQ

SEQ ID NO: 471 - protein, 18 aa, Artificial Sequence
  Description of Artificial Sequence: Synthetic peptide
  MOD_RES (4)..(4): Asp, Gly, His, Asn, Arg or Ser
  MOD_RES (5)..(5): Ala, Gly, Pro or Arg
  MOD_RES (8)..(8): Ser or Tyr
  MOD_RES (9)..(9): Asp or Tyr
  MOD_RES (11)..(11): Ser or Tyr
  MOD_RES (12)..(12): Ala, Gly, Pro or Arg
  MOD_RES (13)..(13): Phe, Ile, Leu or Met
  MOD_RES (15)..(15): Asp, Phe, Val or Tyr
CARXXIYXXYXXXDXWGQ

SEQ ID NO: 472 - protein, 18 aa, Artificial Sequence
  Description of Artificial Sequence: Synthetic peptide
  MOD_RES (8)..(8): Gly or Arg
  MOD_RES (9)..(9): Ala, Asp, Ser or Tyr
CARSGYYXXYYAMDYWGQ

SEQ ID NO: 473 - protein, 18 aa, Artificial Sequence
  Description of Artificial Sequence: Synthetic peptide
  MOD_RES (6)..(6): Ala, Gly, Ser or Thr
  MOD_RES (8)..(8): Gly or Arg
  MOD_RES (9)..(9): Ala, Asp, Ser or Tyr
CARSYXYXXYYAMDYWGQ

SEQ ID NO: 474 - protein, 18 aa, Artificial Sequence
  Description of Artificial Sequence: Synthetic peptide
  MOD_RES (6)..(6): Ala, Gly, Ser or Thr
  MOD_RES (8)..(8): Gly or Arg
  MOD_RES (9)..(9): Ala, Asp, Ser or Tyr
CARSGXYXXYYAMDYWGQ

SEQ ID NO: 475 - protein, 18 aa, Artificial Sequence
  Description of Artificial Sequence: Synthetic peptide
  MOD_RES (7)..(7): Ala, Asp, Gly, Asn, Ser or Thr
  MOD_RES (8)..(8): Gly or Arg
  MOD_RES (9)..(9): Ala, Asp, Ser or Tyr
CARSYYXXXYYAMDYWGQ

SEQ ID NO: 476 - protein, 18 aa, Artificial Sequence
  Description of Artificial Sequence: Synthetic peptide
  MOD_RES (7)..(7): Ala, Asp, Gly, Asn, Ser or Thr
  MOD_RES (8)..(8): Gly or Arg
  MOD_RES (9)..(9): Ala, Asp, Ser or Tyr
CARSGYXXXYYAMDYWGQ

SEQ ID NO: 477 - protein, 18 aa, Artificial Sequence
  Description of Artificial Sequence: Synthetic peptide
  MOD_RES (6)..(6): Ala, Gly, Ser or Thr
  MOD_RES (7)..(7): Ala, Asp, Gly, Asn, Ser or Thr
  MOD_RES (8)..(8): Gly or Arg
  MOD_RES (9)..(9): Ala, Asp, Ser or Tyr
CARSYXXXXYYAMDYWGQ

SEQ ID NO: 478 - protein, 18 aa, Artificial Sequence
  Description of Artificial Sequence: Synthetic peptide
  MOD_RES (6)..(6): Ala, Gly, Ser or Thr
  MOD_RES (7)..(7): Ala, Asp, Gly, Asn, Ser or Thr
  MOD_RES (8)..(8): Gly or Arg
  MOD_RES (9)..(9): Ala, Asp, Ser or Tyr
CARSGXXXXYYAMDYWGQ

SEQ ID NO: 479 - protein, 18 aa, Artificial Sequence
  Description of Artificial Sequence: Synthetic peptide
  MOD_RES (8)..(8): Ser or Tyr
  MOD_RES (9)..(9): Ala, Asp, Ser or Tyr
CARSYYYXXYYAMDYWGQ

SEQ ID NO: 480 - protein, 18 aa, Artificial Sequence
  Description of Artificial Sequence: Synthetic peptide
  MOD_RES (8)..(8): Ser or Tyr
  MOD_RES (9)..(9): Ala, Asp, Ser or Tyr
CARSGYYXXYYAMDYWGQ

SEQ ID NO: 481 - protein, 18 aa, Artificial Sequence
  Description of Artificial Sequence: Synthetic peptide
  MOD_RES (6)..(6): Ala, Gly, Ser or Thr
  MOD_RES (8)..(8): Ser or Tyr
  MOD_RES (9)..(9): Ala, Asp, Ser or Tyr
CARSYXYXXYYAMDYWGQ

SEQ ID NO: 482 - protein, 18 aa, Artificial Sequence
  Description of Artificial Sequence: Synthetic peptide
  MOD_RES (6)..(6): Ala, Gly, Ser or Thr
  MOD_RES (8)..(8): Ser or Tyr
  MOD_RES (9)..(9): Ala, Asp, Ser or Tyr
CARSGXYXXYYAMDYWGQ

SEQ ID NO: 483 - protein, 18 aa, Artificial Sequence
  Description of Artificial Sequence: Synthetic peptide
  MOD_RES (7)..(7): Ala, Asp, Gly, Asn, Ser or Thr
  MOD_RES (8)..(8): Ser or Tyr
  MOD_RES (9)..(9): Ala, Asp, Ser or Tyr
CARSYYXXXYYAMDYWGQ

SEQ ID NO: 484 - protein, 18 aa, Artificial Sequence
  Description of Artificial Sequence: Synthetic peptide
  MOD_RES (7)..(7): Ala, Asp, Gly, Asn, Ser or Thr
  MOD_RES (8)..(8): Ser or Tyr
  MOD_RES (9)..(9): Ala, Asp, Ser or Tyr
CARSGYXXXYYAMDYWGQ

SEQ ID NO: 485 - protein, 18 aa, Artificial Sequence
  Description of Artificial Sequence: Synthetic peptide
  MOD_RES (6)..(6): Ala, Gly, Ser or Thr
  MOD_RES (7)..(7): Ala, Asp, Gly, Asn, Ser or Thr
  MOD_RES (8)..(8): Ser or Tyr
  MOD_RES (9)..(9): Ala, Asp, Ser or Tyr
CARSYXXXXYYAMDYWGQ

SEQ ID NO: 486 - protein, 18 aa, Artificial Sequence
  Description of Artificial Sequence: Synthetic peptide
  MOD_RES (6)..(6): Ala, Gly, Ser or Thr
  MOD_RES (7)..(7): Ala, Asp, Gly, Asn, Ser or Thr
  MOD_RES (8)..(8): Ser or Tyr
  MOD_RES (9)..(9): Ala, Asp, Ser or Tyr
CARSGXXXXYYAMDYWGQ

SEQ ID NO: 487 - protein, 18 aa, Artificial Sequence
  Description of Artificial Sequence: Synthetic peptide
  MOD_RES (8)..(8): Gly or Arg
  MOD_RES (9)..(9): Ala, Asp, Ser or Tyr
CARSYYYXXYYAMDYWGQ

SEQ ID NO: 488 - protein, 18 aa, Artificial Sequence
  Description of Artificial Sequence: Synthetic peptide
  MOD_RES (4)..(4): Phe, His, Leu, Pro, Ser or Tyr
  MOD_RES (8)..(8): Ser or Tyr
  MOD_RES (9)..(9): Asp, Gly, Asn or Ser
  MOD_RES (10)..(10): Ala, Asp, Ser or Tyr
CARXYYYXXXYAMDYWGQ

SEQ ID NO: 489 - protein, 18 aa, Artificial Sequence
  Description of Artificial Sequence: Synthetic peptide
  MOD_RES (4)..(4): Asp or Gly
  MOD_RES (8)..(8): Ser or Tyr
  MOD_RES (9)..(9): Asp, Gly, Asn or Ser
  MOD_RES (10)..(10): Ala, Asp, Ser or Tyr
CARXYYYXXXYAMDYWGQ

SEQ ID NO: 490 - protein, 18 aa, Artificial Sequence
  Description of Artificial Sequence: Synthetic peptide
  MOD_RES (4)..(4): Phe, His, Leu, Pro, Ser or Tyr
  MOD_RES (5)..(5): Ala or Gly
  MOD_RES (8)..(8): Ser or Tyr
  MOD_RES (9)..(9): Asp, Gly, Asn or Ser
  MOD_RES (10)..(10): Ala, Asp, Ser or Tyr
CARXXYYXXXYAMDYWGQ

SEQ ID NO: 491 - protein, 18 aa, Artificial Sequence
  Description of Artificial Sequence: Synthetic peptide
  MOD_RES (4)..(4): Asp or Gly
  MOD_RES (5)..(5): Ala or Gly
  MOD_RES (8)..(8): Ser or Tyr
  MOD_RES (9)..(9): Asp, Gly, Asn or Ser
  MOD_RES (10)..(10): Ala, Asp, Ser or Tyr
CARXXYYXXXYAMDYWGQ

SEQ ID NO: 492 - protein, 18 aa, Artificial Sequence
  Description of Artificial Sequence: Synthetic peptide
  MOD_RES (4)..(4): Phe, His, Leu, Pro, Ser or Tyr
  MOD_RES (8)..(8): Gly, Leu, Arg or Val
  MOD_RES (9)..(9): Asp, Gly, Asn or Ser
  MOD_RES (10)..(10): Ala, Asp, Ser or Tyr
CARXYYYXXXYAMDYWGQ

SEQ ID NO: 493 - protein, 18 aa, Artificial Sequence
  Description of Artificial Sequence: Synthetic peptide
  MOD_RES (4)..(4): Asp or Gly
  MOD_RES (8)..(8): Gly, Leu, Arg or Val
  MOD_RES (9)..(9): Asp, Gly, Asn or Ser
  MOD_RES (10)..(10): Ala, Asp, Ser or Tyr
CARXYYYXXXYAMDYWGQ

SEQ ID NO: 494 - protein, 18 aa, Artificial Sequence
  Description of Artificial Sequence: Synthetic peptide
  MOD_RES (4)..(4): Phe, His, Leu, Pro, Ser or Tyr
  MOD_RES (5)..(5): Ala or Gly
  MOD_RES (8)..(8): Gly, Leu, Arg or Val
  MOD_RES (9)..(9): Asp, Gly, Asn or Ser
  MOD_RES (10)..(10): Ala, Asp, Ser or Tyr
CARXXYYXXXYAMDYWGQ

SEQ ID NO: 495 - protein, 18 aa, Artificial Sequence
  Description of Artificial Sequence: Synthetic peptide
  MOD_RES (4)..(4): Asp or Gly
  MOD_RES (5)..(5): Ala or Gly
  MOD_RES (8)..(8): Gly, Leu, Arg or Val
  MOD_RES (9)..(9): Asp, Gly, Asn or Ser
  MOD_RES (10)..(10): Ala, Asp, Ser or Tyr
CARXXYYXXXYAMDYWGQ

SEQ ID NO: 496 - protein, 18 aa, Artificial Sequence
  Description of Artificial Sequence: Synthetic peptide
CVTSLTWLLRRKRSYWGQ

SEQ ID NO: 497 - protein, 19 aa, Artificial Sequence
  Description of Artificial Sequence: Synthetic peptide
  MOD_RES (4)..(4): Asp or Gly
  MOD_RES (8)..(9): Ser or Tyr
  MOD_RES (10)..(10): Gly or Ser
  MOD_RES (13)..(13): Ala, Asp, Ser or Tyr
  MOD_RES (14)..(14): Phe, Ile, Leu or Met
  MOD_RES (16)..(16): Asp, Phe, Val or Tyr
CARXGYYXXXYYXXDXWGQ

SEQ ID NO: 498 - protein, 19 aa, Artificial Sequence
  Description of Artificial Sequence: Synthetic peptide
  MOD_RES (4)..(4): Asp or Gly
  MOD_RES (8)..(9): Ser or Tyr
  MOD_RES (10)..(10): Gly or Ser
  MOD_RES (13)..(13): Ala, Asp, Ser or Tyr
  MOD_RES (14)..(14): Phe, Ile, Leu or Met
  MOD_RES (16)..(16): Asp, Phe, Val or Tyr
CARXGYGXXXYYXXDXWGQ

SEQ ID NO: 499 - protein, 19 aa, Artificial Sequence
  Description of Artificial Sequence: Synthetic peptide
  MOD_RES (4)..(4): Asp or Gly
  MOD_RES (9)..(9): Ser or Tyr
  MOD_RES (10)..(10): Gly or Ser
  MOD_RES (13)..(13): Ala, Asp, Ser or Tyr
  MOD_RES (14)..(14): Phe, Ile, Leu or Met
  MOD_RES (16)..(16): Asp, Phe, Val or Tyr
CARXGYYGXXYYXXDXWGQ

SEQ ID NO: 500 - protein, 19 aa, Artificial Sequence
  Description of Artificial Sequence: Synthetic peptide
  MOD_RES (4)..(4): Asp or Gly
  MOD_RES (9)..(9): Ser or Tyr
  MOD_RES (10)..(10): Gly or Ser
  MOD_RES (13)..(13): Ala, Asp, Ser or Tyr
  MOD_RES (14)..(14): Phe, Ile, Leu or Met
  MOD_RES (16)..(16): Asp, Phe, Val or Tyr
CARXGYGGXXYYXXDXWGQ

SEQ ID NO: 501 - protein, 19 aa, Artificial Sequence
  Description of Artificial Sequence: Synthetic peptide
  MOD_RES (4)..(4): Asp or Gly
  MOD_RES (8)..(9): Ser or Tyr
  MOD_RES (10)..(10): Gly or Ser
  MOD_RES (13)..(13): Ala, Asp, Ser or Tyr
  MOD_RES (14)..(14): Phe, Ile, Leu or Met
  MOD_RES (16)..(16): Asp, Phe, Val or Tyr
CARXGYYXXXYGXXDXWGQ

SEQ ID NO: 502 - protein, 19 aa, Artificial Sequence
  Description of Artificial Sequence: Synthetic peptide
  MOD_RES (4)..(4): Asp or Gly
  MOD_RES (8)..(9): Ser or Tyr
  MOD_RES (10)..(10): Gly or Ser
  MOD_RES (13)..(13): Ala, Asp, Ser or Tyr
  MOD_RES (14)..(14): Phe, Ile, Leu or Met
  MOD_RES (16)..(16): Asp, Phe, Val or Tyr
CARXGYGXXXYGXXDXWGQ

SEQ ID NO: 503 - protein, 19 aa, Artificial Sequence
  Description of Artificial Sequence: Synthetic peptide
  MOD_RES (4)..(4): Asp or Gly
  MOD_RES (9)..(9): Ser or Tyr
  MOD_RES (10)..(10): Gly or Ser
  MOD_RES (13)..(13): Ala, Asp, Ser or Tyr
  MOD_RES (14)..(14): Phe, Ile, Leu or Met
  MOD_RES (16)..(16): Asp, Phe, Val or Tyr
CARXGYYGXXYGXXDXWGQ

SEQ ID NO: 504 - protein, 19 aa, Artificial Sequence
  Description of Artificial Sequence: Synthetic peptide
  MOD_RES (4)..(4): Asp or Gly
  MOD_RES (9)..(9): Ser or Tyr
  MOD_RES (10)..(10): Gly or Ser
  MOD_RES (13)..(13): Ala, Asp, Ser or Tyr
  MOD_RES (14)..(14): Phe, Ile, Leu or Met
  MOD_RES (16)..(16): Asp, Phe, Val or Tyr
CARXGYGGXXYGXXDXWGQ

SEQ ID NO: 505 - protein, 19 aa, Artificial Sequence
  Description of Artificial Sequence: Synthetic peptide
  MOD_RES (5)..(5): Gly or Arg
  MOD_RES (6)..(6): Phe, Ile, Asn or Tyr
  MOD_RES (8)..(8): Ser or Tyr
  MOD_RES (9)..(9): Asp, Phe, Val or Tyr
  MOD_RES (11)..(11): Asp or Tyr
  MOD_RES (13)..(13): Ala or Gly
  MOD_RES (16)..(16): Asp, Phe, Val or Tyr
CARSXXYXXYXYXMDXWGQ

SEQ ID NO: 506 - protein, 19 aa, Artificial Sequence
  Description of Artificial Sequence: Synthetic peptide
  MOD_RES (5)..(5): Gly or Arg
  MOD_RES (6)..(6): Phe, Ile, Asn or Tyr
  MOD_RES (7)..(7): Ala, Gly, Ser or Thr
  MOD_RES (8)..(8): Ser or Tyr
  MOD_RES (9)..(9): Asp, Phe, Val or Tyr
  MOD_RES (11)..(11): Asp or Tyr
  MOD_RES (13)..(13): Ala or Gly
  MOD_RES (16)..(16): Asp, Phe, Val or Tyr
CARSXXXXXYXYXMDXWGQ

SEQ ID NO: 507 - protein, 19 aa, Artificial Sequence
  Description of Artificial Sequence: Synthetic peptide
  MOD_RES (6)..(6): Ala, Gly, Ser or Thr
  MOD_RES (7)..(7): Ala or Ser
  MOD_RES (9)..(9): Ser or Tyr
  MOD_RES (14)..(14): Phe, Ile, Leu or Met
  MOD_RES (16)..(16): Asp, Phe, Val or Tyr
CARDGXXYXYYYYXDXWGQ

SEQ ID NO: 508 - protein, 19 aa, Artificial Sequence
  Description of Artificial Sequence: Synthetic peptide
  MOD_RES (6)..(6): Ala, Gly, Ser or Thr
  MOD_RES (7)..(7): Ala or Ser
  MOD_RES (9)..(9): Ser or Tyr
  MOD_RES (12)..(12): Gly or Trp
  MOD_RES (14)..(14): Phe, Ile, Leu or Met
  MOD_RES (16)..(16): Asp, Phe, Val or Tyr
CARDGXXYXYYXYXDXWGQ

SEQ ID NO: 509 - protein, 19 aa, Artificial Sequence
  Description of Artificial Sequence: Synthetic peptide
  MOD_RES (6)..(6): Ala, Gly, Ser or Thr
  MOD_RES (7)..(7): Ala or Ser
  MOD_RES (9)..(9): Ser or Tyr
  MOD_RES (14)..(14): Phe, Ile, Leu or Met
  MOD_RES (16)..(16): Asp, Phe, Val or Tyr
CARDGXXYXYYYGXDXWGQ

SEQ ID NO: 510 - protein, 19 aa, Artificial Sequence
  Description of Artificial Sequence: Synthetic peptide
  MOD_RES (6)..(6): Ala, Gly, Ser or Thr
  MOD_RES (7)..(7): Ala or Ser
  MOD_RES (9)..(9): Ser or Tyr
  MOD_RES (12)..(12): Gly or Trp
  MOD_RES (14)..(14): Phe, Ile, Leu or Met
  MOD_RES (16)..(16): Asp, Phe, Val or Tyr
CARDGXXYXYYXGXDXWGQ

SEQ ID NO: 511 - protein, 19 aa, Artificial Sequence
  Description of Artificial Sequence: Synthetic peptide
  MOD_RES (4)..(4): Asp, Gly, Asn or Ser
  MOD_RES (5)..(5): Gly or Arg
  MOD_RES (8)..(8): Ser or Tyr
  MOD_RES (9)..(9): Gly, Ile, Ser or Val
  MOD_RES (10)..(10): Asn, Ser, Thr or Tyr
  MOD_RES (14)..(14): Phe, Ile, Leu or Met
CARXXYYXXXYYAXDYWGQ

SEQ ID NO: 512 - protein, 19 aa, Artificial Sequence
  Description of Artificial Sequence: Synthetic peptide
  MOD_RES (4)..(4): Asp, Gly, Asn or Ser
  MOD_RES (5)..(5): Gly or Arg
  MOD_RES (8)..(8): Asp or Gly
  MOD_RES (9)..(9): Gly, Ile, Ser or Val
  MOD_RES (10)..(10): Asn, Ser, Thr or Tyr
  MOD_RES (14)..(14): Phe, Ile, Leu or Met
CARXXYYXXXYYAXDYWGQ

SEQ ID NO: 513 - protein, 19 aa, Artificial Sequence
  Description of Artificial Sequence: Synthetic peptide
  MOD_RES (4)..(4): Asp, Gly, Asn or Ser
  MOD_RES (5)..(5): Gly or Arg
  MOD_RES (8)..(8): Ser or Tyr
  MOD_RES (9)..(9): Gly, Ile, Ser or Val
  MOD_RES (10)..(10): Asn, Ser, Thr or Tyr
  MOD_RES (14)..(14): Phe, Ile, Leu or Met
CARXXYYXXXGYAXDYWGQ

SEQ ID NO: 514 - protein, 19 aa, Artificial Sequence
  Description of Artificial Sequence: Synthetic peptide
  MOD_RES (4)..(4): Asp, Gly, Asn or Ser
  MOD_RES (5)..(5): Gly or Arg
  MOD_RES (8)..(8): Asp or Gly
  MOD_RES (9)..(9): Gly, Ile, Ser or Val
  MOD_RES (10)..(10): Asn, Ser, Thr or Tyr
  MOD_RES (14)..(14): Phe, Ile, Leu or Met
CARXXYYXXXGYAXDYWGQ

SEQ ID NO: 515 - protein, 19 aa, Artificial Sequence
  Description of Artificial Sequence: Synthetic peptide
  MOD_RES (5)..(5): Ile or Leu
  MOD_RES (7)..(7): Phe, Ile, Asn, Ser, Thr or Tyr
  MOD_RES (8)..(8): Asn, Ser, Thr or Tyr
  MOD_RES (9)..(9): Ala, Gly, Ser or Thr
  MOD_RES (10)..(10): Ser or Tyr
  MOD_RES (13)..(13): Ala or Gly
  MOD_RES (14)..(14): Phe, Ile, Leu or Met
  MOD_RES (16)..(16): Asp, Phe, Val or Tyr
CARDXYXXXXYYXXDXWGQ

SEQ ID NO: 516 - protein, 19 aa, Artificial Sequence
  Description of Artificial Sequence: Synthetic peptide
  MOD_RES (5)..(5): Glu, Gly, Lys or Arg
  MOD_RES (6)..(6): Asp or Gly
  MOD_RES (8)..(8): Ser or Tyr
  MOD_RES (9)..(9): Asp, Gly, Asn or Ser
  MOD_RES (10)..(10): Ser or Tyr
  MOD_RES (13)..(13): Ala, Asp, Ser or Tyr
  MOD_RES (14)..(14): Phe, Ile, Leu or Met
CARGXXYXXXYYXXDYWGQ

SEQ ID NO: 517 - protein, 19 aa, Artificial Sequence
  Description of Artificial Sequence: Synthetic peptide
  MOD_RES (5)..(5): Glu, Gly, Lys or Arg
  MOD_RES (6)..(6): Asp or Gly
  MOD_RES (8)..(8): Ser or Tyr
  MOD_RES (9)..(9): Asp, Gly, Asn or Ser
  MOD_RES (10)..(10): Ser or Tyr
  MOD_RES (13)..(13): Ala, Asp, Ser or Tyr
  MOD_RES (14)..(14): Phe, Ile, Leu or Met
CARGXXYXXXWYXXDYWGQ

SEQ ID NO: 518 - protein, 19 aa, Artificial Sequence
  Description of Artificial Sequence: Synthetic peptide
  MOD_RES (4)..(4): Gly, Asp or Glu
  MOD_RES (6)..(6): Ala, Asp, Asn or Thr
  MOD_RES (7)..(7): Gly, Ile, Ser or Val
  MOD_RES (8)..(8): Ala, Gly, Ser or Thr
  MOD_RES (9)..(9): Gly or Ser
  MOD_RES (11)..(11): Asn, Ser, Thr or Tyr
CARXYXXXXTXWYFDLWGR

SEQ ID NO: 519 - protein, 19 aa, Artificial Sequence
  Description of Artificial Sequence: Synthetic peptide
  MOD_RES (4)..(4): Gly, Asp or Glu
  MOD_RES (6)..(6): Ala, Asp, Asn or Thr
  MOD_RES (7)..(7): Gly, Ile, Ser or Val
  MOD_RES (8)..(8): Ala, Gly, Ser or Thr
  MOD_RES (9)..(9): Gly or Ser
  MOD_RES (11)..(11): Asn, Ser, Thr or Tyr
CARXGXXXXTXWYFDLWGR

SEQ ID NO: 520 - protein, 19 aa, Artificial Sequence
  Description of Artificial Sequence: Synthetic peptide
  MOD_RES (5)..(5): Glu, Gly, Lys or Arg
  MOD_RES (6)..(6): Asp or Gly
  MOD_RES (8)..(8): Ser or Tyr
  MOD_RES (9)..(9): Asp, Gly, Asn or Ser
  MOD_RES (10)..(10): Ser or Tyr
  MOD_RES (13)..(13): Ala, Asp, Ser or Tyr
  MOD_RES (14)..(14): Phe, Ile, Leu or Met
CARGXXYXXXYYXXDYWGQ

SEQ ID NO: 521 - protein, 19 aa, Artificial Sequence
  Description of Artificial Sequence: Synthetic peptide
  MOD_RES (5)..(5): Glu, Gly, Lys or Arg
  MOD_RES (6)..(6): Asp or Gly
  MOD_RES (8)..(8): Ser or Tyr
  MOD_RES (9)..(9): Asp, Gly, Asn or Ser
  MOD_RES (10)..(10): Ser or Tyr
  MOD_RES (13)..(13): Ala, Asp, Ser or Tyr
  MOD_RES (14)..(14): Phe, Ile, Leu or Met
CARGXXYXXXWYXXDYWGQ

SEQ ID NO: 522 - protein, 20 aa, Artificial Sequence
  Description of Artificial Sequence: Synthetic peptide
  MOD_RES (5)..(5): Gly or Ser
  MOD_RES (9)..(9): Gly, Ile, Ser or Val
  MOD_RES (14)..(14): Ala, Asp, Ser or Tyr
  MOD_RES (15)..(15): Phe, Ile, Leu or Met
  MOD_RES (17)..(17): Asp, Phe, Val or Tyr
CARVXYYYXSSYYXXDXWGQ

SEQ ID NO: 523 - protein, 20 aa, Artificial Sequence
  Description of Artificial Sequence: Synthetic peptide
  MOD_RES (5)..(5): Gly or Ser
  MOD_RES (8)..(8): Asp or Gly
  MOD_RES (9)..(9): Gly, Ile, Ser or Val
  MOD_RES (14)..(14): Ala, Asp, Ser or Tyr
  MOD_RES (15)..(15): Phe, Ile, Leu or Met
  MOD_RES (17)..(17): Asp, Phe, Val or Tyr
CARVXYYXXSSYYXXDXWGQ

SEQ ID NO: 524 - protein, 20 aa, Artificial Sequence
  Description of Artificial Sequence: Synthetic peptide
  MOD_RES (5)..(5): Gly or Ser
  MOD_RES (9)..(9): Gly, Ile, Ser or Val
  MOD_RES (12)..(12): Asp or Gly
  MOD_RES (14)..(14): Ala, Asp, Ser or Tyr
  MOD_RES (15)..(15): Phe, Ile, Leu or Met
  MOD_RES (17)..(17): Asp, Phe, Val or Tyr
CARVXYYYXSSXYXXDXWGQ

SEQ ID NO: 525 - protein, 20 aa, Artificial Sequence
  Description of Artificial Sequence: Synthetic peptide
  MOD_RES (5)..(5): Gly or Ser
  MOD_RES (8)..(8): Asp or Gly
  MOD_RES (9)..(9): Gly, Ile, Ser or Val
  MOD_RES (12)..(12): Asp or Gly
  MOD_RES (14)..(14): Ala, Asp, Ser or Tyr
  MOD_RES (15)..(15): Phe, Ile, Leu or Met
  MOD_RES (17)..(17): Asp, Phe, Val or Tyr
CARVXYYXXSSXYXXDXWGQ

SEQ ID NO: 526 - protein, 20 aa, Artificial Sequence
  Description of Artificial Sequence: Synthetic peptide
  MOD_RES (5)..(5): Gly or Ser
  MOD_RES (9)..(9): Gly, Ile, Ser or Val
  MOD_RES (14)..(14): Ala, Asp, Ser or Tyr
  MOD_RES (15)..(15): Phe, Ile, Leu or Met
  MOD_RES (17)..(17): Asp, Phe, Val or Tyr
CARVXYYYXSSYWXXDXWGQ

SEQ ID NO: 527 - protein, 20 aa, Artificial Sequence
  Description of Artificial Sequence: Synthetic peptide
  MOD_RES (5)..(5): Gly or Ser
  MOD_RES (8)..(8): Asp or Gly
  MOD_RES (9)..(9): Gly, Ile, Ser or Val
  MOD_RES (14)..(14): Ala, Asp, Ser or Tyr
  MOD_RES (15)..(15): Phe, Ile, Leu or Met
  MOD_RES (17)..(17): Asp, Phe, Val or Tyr
CARVXYYXXSSYWXXDXWGQ

SEQ ID NO: 528 - protein, 20 aa, Artificial Sequence
  Description of Artificial Sequence: Synthetic peptide
  MOD_RES (5)..(5): Gly or Ser
  MOD_RES (9)..(9): Gly, Ile, Ser or Val
  MOD_RES (12)..(12): Asp or Gly
  MOD_RES (14)..(14): Ala, Asp, Ser or Tyr
  MOD_RES (15)..(15): Phe, Ile, Leu or Met
  MOD_RES (17)..(17): Asp, Phe, Val or Tyr
CARVXYYYXSSXWXXDXWGQ

SEQ ID NO: 529 - protein, 20 aa, Artificial Sequence
  Description of Artificial Sequence: Synthetic peptide
  MOD_RES (5)..(5): Gly or Ser
  MOD_RES (8)..(8): Asp or Gly
  MOD_RES (9)..(9): Gly, Ile, Ser or Val
  MOD_RES (12)..(12): Asp or Gly
  MOD_RES (14)..(14): Ala, Asp, Ser or Tyr
  MOD_RES (15)..(15): Phe, Ile, Leu or Met
  MOD_RES (17)..(17): Asp, Phe, Val or Tyr
CARVXYYXXSSXWXXDXWGQ

SEQ ID NO: 530 - protein, 20 aa, Artificial Sequence
  Description of Artificial Sequence: Synthetic peptide
  MOD_RES (4)..(4): Asp or Glu
  MOD_RES (5)..(5): Ala, Gly, Pro or Arg
  MOD_RES (7)..(7): Asp or Tyr
  MOD_RES (9)..(9): Asp or Gly
  MOD_RES (11)..(11): Ser or Tyr
  MOD_RES (15)..(15): Phe, Ile, Leu or Met
  MOD_RES (17)..(17): Asp, Phe, Val or Tyr
CARXXYXYXSXYYYXDXWGQ

SEQ ID NO: 531 - protein, 20 aa, Artificial Sequence
  Description of Artificial Sequence: Synthetic peptide
  MOD_RES (4)..(4): Asp or Glu
  MOD_RES (5)..(5): Ala, Gly, Pro or Arg
  MOD_RES (7)..(7): Asp or Tyr
  MOD_RES (9)..(9): Asp or Gly
  MOD_RES (11)..(11): Ser or Tyr
  MOD_RES (15)..(15): Phe, Ile, Leu or Met
  MOD_RES (17)..(17): Asp, Phe, Val or Tyr
CARXXYXRXSXYYYXDXWGQ

SEQ ID NO: 532 - protein, 20 aa, Artificial Sequence
  Description of Artificial Sequence: Synthetic peptide
  MOD_RES (4)..(4): Asp or Glu
  MOD_RES (5)..(5): Ala, Gly, Pro or Arg
  MOD_RES (7)..(7): Asp or Tyr
  MOD_RES (9)..(9): Asp or Gly
  MOD_RES (11)..(11): Ser or Tyr
  MOD_RES (14)..(14): Ala or Gly
  MOD_RES (15)..(15): Phe, Ile, Leu or Met
  MOD_RES (17)..(17): Asp, Phe, Val or Tyr
CARXXYXYXSXYYXXDXWGQ

SEQ ID NO: 533 - protein, 20 aa, Artificial Sequence
  Description of Artificial Sequence: Synthetic peptide
  MOD_RES (4)..(4): Asp or Glu
  MOD_RES (5)..(5): Ala, Gly, Pro or Arg
  MOD_RES (7)..(7): Asp or Tyr
  MOD_RES (9)..(9): Asp or Gly
  MOD_RES (11)..(11): Ser or Tyr
  MOD_RES (14)..(14): Ala or Gly
  MOD_RES (15)..(15): Phe, Ile, Leu or Met
  MOD_RES (17)..(17): Asp, Phe, Val or Tyr
CARXXYXRXSXYYXXDXWGQ

SEQ ID NO: 534 - protein, 20 aa, Artificial Sequence
  Description of Artificial Sequence: Synthetic peptide
CATGNSVRLASWEGYFYWGQ

SEQ ID NO: 535 - protein, 20 aa, Artificial Sequence
  Description of Artificial Sequence: Synthetic peptide
CARQGRVRLATESGLDYWGQ

SEQ ID NO: 536 - protein, 20 aa, Artificial Sequence
  Description of Artificial Sequence: Synthetic peptide
  MOD_RES (4)..(4): Glu, Lys, Met or Val
  MOD_RES (6)..(6): Ala or Ser
  MOD_RES (8)..(8): His or Arg
  MOD_RES (9)..(9): Ile or Leu
  MOD_RES (10)..(10): Ser or Thr
  MOD_RES (11)..(11): Val, Asp, Glu, Ile, Lys, Met or Asn
  MOD_RES (12)..(12): Asp, Ile, Asn or Val
  MOD_RES (13)..(13): Asp, Glu, His or Gln
  MOD_RES (17)..(17): Ala, Asp, Ser or Tyr
CARXGXDXXXXXXPFDXWGP

SEQ ID NO: 537 - protein, 20 aa, Artificial Sequence
  Description of Artificial Sequence: Synthetic peptide
  MOD_RES (4)..(4): Asp or Gly
  MOD_RES (5)..(5): Gly or Arg
  MOD_RES (6)..(6): Gly or Ser
  MOD_RES (9)..(9): Gly or Val
  MOD_RES (10)..(10): Ala or Ser
  MOD_RES (11)..(12): Gly or Ser
  MOD_RES (14)..(14): His, Pro, Ser or Tyr
CARXXXYYXXXXYXFDYWGQ

SEQ ID NO: 538 - protein, 20 aa, Artificial Sequence
  Description of Artificial Sequence: Synthetic peptide
  MOD_RES (4)..(4): Asp or Gly
  MOD_RES (5)..(5): Gly or Arg
  MOD_RES (6)..(6): Gly or Ser
  MOD_RES (9)..(9): Gly or Val
  MOD_RES (10)..(10): Ala or Ser
  MOD_RES (11)..(12): Gly or Ser
  MOD_RES (14)..(14): His, Pro, Ser or Tyr
CARXXXYRXXXXYXFDYWGQ

SEQ ID NO: 539 - protein, 20 aa, Artificial Sequence
  Description of Artificial Sequence: Synthetic peptide
  MOD_RES (4)..(4): Glu or Val
  MOD_RES (7)..(7): Asp, Glu, His or Gln
  MOD_RES (11)..(11): Gly, Leu, Arg or Val
  MOD_RES (14)..(14): Ala or Pro
CARXSFXQLTXYAXFDIWGQ

SEQ ID NO: 540 - protein, 20 aa, Artificial Sequence
  Description of Artificial Sequence: Synthetic peptide
  MOD_RES (4)..(4): Asp or Gly
  MOD_RES (5)..(5): Ala, Gly, Pro or Arg
  MOD_RES (11)..(11): Ser or Tyr
  MOD_RES (12)..(12): His, Pro, Ser or Tyr
  MOD_RES (14)..(14): Ala, Asp, Ser or Tyr
  MOD_RES (15)..(15): Phe, Ile, Leu or Met
CARXXYYYGSXXYXXDYWGQ

SEQ ID NO: 541 - protein, 20 aa, Artificial Sequence
  Description of Artificial Sequence: Synthetic peptide
  MOD_RES (4)..(4): Asp or Gly
  MOD_RES (5)..(5): Ala, Gly, Pro or Arg
  MOD_RES (11)..(11): Ser or Tyr
  MOD_RES (12)..(12): His, Pro, Ser or Tyr
  MOD_RES (14)..(14): Ala, Asp, Ser or Tyr
  MOD_RES (15)..(15): Phe, Ile, Leu or Met
CARXXGYYGSXXYXXDYWGQ

SEQ ID NO: 542 - protein, 20 aa, Artificial Sequence
  Description of Artificial Sequence: Synthetic peptide
  MOD_RES (4)..(4): Asp or Gly
  MOD_RES (5)..(5): Ala, Gly, Pro or Arg
  MOD_RES (12)..(12): His, Pro, Ser or Tyr
  MOD_RES (14)..(14): Ala, Asp, Ser or Tyr
  MOD_RES (15)..(15): Phe, Ile, Leu or Met
CARXXYYYGSGXYXXDYWGQ

SEQ ID NO: 543 - protein, 20 aa, Artificial Sequence
  Description of Artificial Sequence: Synthetic peptide
  MOD_RES (4)..(4): Asp or Gly
  MOD_RES (5)..(5): Ala, Gly, Pro or Arg
  MOD_RES (12)..(12): His, Pro, Ser or Tyr
  MOD_RES (14)..(14): Ala, Asp, Ser or Tyr
  MOD_RES (15)..(15): Phe, Ile, Leu or Met
CARXXGYYGSGXYXXDYWGQ

SEQ ID NO: 544 - protein, 20 aa, Artificial Sequence
  Description of Artificial Sequence: Synthetic peptide
  MOD_RES (4)..(4): Asp or Gly
  MOD_RES (5)..(5): Ala, Gly, Pro or Arg
  MOD_RES (11)..(11): Ser or Tyr
  MOD_RES (14)..(14): Ala, Asp, Ser or Tyr
  MOD_RES (15)..(15): Phe, Ile, Leu or Met
CARXXYYYGSXGYXXDYWGQ

SEQ ID NO: 545 - protein, 20 aa, Artificial Sequence
  Description of Artificial Sequence: Synthetic peptide
  MOD_RES (4)..(4): Asp or Gly
  MOD_RES (5)..(5): Ala, Gly, Pro or Arg
  MOD_RES (11)..(11): Ser or Tyr
  MOD_RES (14)..(14): Ala, Asp, Ser or Tyr
  MOD_RES (15)..(15): Phe, Ile, Leu or Met
CARXXGYYGSXGYXXDYWGQ

SEQ ID NO: 546 - protein, 20 aa, Artificial Sequence
  Description of Artificial Sequence: Synthetic peptide
  MOD_RES (4)..(4): Asp or Gly
  MOD_RES (5)..(5): Ala, Gly, Pro or Arg
  MOD_RES (14)..(14): Ala, Asp, Ser or Tyr
  MOD_RES (15)..(15): Phe, Ile, Leu or Met
CARXXYYYGSGGYXXDYWGQ

SEQ ID NO: 547 - protein, 20 aa, Artificial Sequence
  Description of Artificial Sequence: Synthetic peptide
  MOD_RES (4)..(4): Asp or Gly
  MOD_RES (5)..(5): Ala, Gly, Pro or Arg
  MOD_RES (14)..(14): Ala, Asp, Ser or Tyr
  MOD_RES (15)..(15): Phe, Ile, Leu or Met
CARXXGYYGSGGYXXDYWGQ

SEQ ID NO: 548 - protein, 20 aa, Artificial Sequence
  Description of Artificial Sequence: Synthetic peptide
  MOD_RES (9)..(9): Gly or Ser
  MOD_RES (11)..(11): Gly or Ser
  MOD_RES (15)..(15): Phe or Leu
CARGRPPYXSXWYYXDYWGQ

SEQ ID NO: 549 - protein, 20 aa, Artificial Sequence
  Description of Artificial Sequence: Synthetic peptide
  MOD_RES (9)..(9): Gly or Ser
  MOD_RES (11)..(11): Gly or Ser
  MOD_RES (15)..(15): Phe or Leu
CARGRPPYXSXWGYXDYWGQ

SEQ ID NO: 550 - protein, 20 aa, Artificial Sequence
  Description of Artificial Sequence: Synthetic peptide
  MOD_RES (9)..(9): Gly or Ser
  MOD_RES (11)..(11): Gly or Ser
  MOD_RES (14)..(14): Ala or Gly
  MOD_RES (15)..(15): Phe or Leu
CARGRPPYXSXWYXXDYWGQ

SEQ ID NO: 551 - protein, 20 aa, Artificial Sequence
  Description of Artificial Sequence: Synthetic peptide
  MOD_RES (9)..(9): Gly or Ser
  MOD_RES (11)..(11): Gly or Ser
  MOD_RES (14)..(14): Ala or Gly
  MOD_RES (15)..(15): Phe or Leu
CARGRPPYXSXWGXXDYWGQ

SEQ ID NO: 552 - protein, 16 aa, Artificial Sequence
  Description of Artificial Sequence: Synthetic peptide
  MOD_RES (4)..(4): Arg or Ser
  MOD_RES (9)..(9): Ile or Val
  MOD_RES (10)..(10): Asn or Ser
  MOD_RES (12)..(12): Ile or Met
  MOD_RES (13)..(13): His, Asn or Tyr
MTCXASSSXXYXXWYQ

SEQ ID NO: 553 - protein, 16 aa, Artificial Sequence
  Description of Artificial Sequence: Synthetic peptide
  MOD_RES (9)..(9): Asn or Ser
  MOD_RES (11)..(11): Phe or Tyr
LTCRAVTTXNXANWVQ

SEQ ID NO: 554 - protein, 17 aa, Artificial Sequence
  Description of Artificial Sequence: Synthetic peptide
  MOD_RES (8)..(8): Ala, Asp, Ser or Tyr
  MOD_RES (9)..(9): Ile or Val
  MOD_RES (10)..(10): Gly or Ser
  MOD_RES (11)..(11): Asn, Ser or Thr
  MOD_RES (14)..(14): Ala, Asp, Asn or Thr
ITCRASQXXXXYLXWYQ

SEQ ID NO: 555 - protein, 20 aa, Artificial Sequence
  Description of Artificial Sequence: Synthetic peptide
  MOD_RES (4)..(4): Gly or Arg
  MOD_RES (12)..(12): Ser or Thr
  MOD_RES (13)..(13): Gly or Ser
  MOD_RES (14)..(14): His or Asn
  MOD_RES (16)..(16): Ala or Pro
LTCXSSTGAVTXXXYXNWVQ

SEQ ID NO: 556 - protein, 20 aa, Artificial Sequence
  Description of Artificial Sequence: Synthetic peptide
  MOD_RES (6)..(6): Ser or Thr
  MOD_RES (9)..(9): Asp or Asn
  MOD_RES (10)..(10): Ile or Val
  MOD_RES (12)..(12): Ala, Gly, Ser or Thr
  MOD_RES (15)..(15): Asp or Tyr
ISCTGXSSXXGXYNXVSWYQ

SEQ ID NO: 557 - protein, 20 aa, Artificial Sequence
  Description of Artificial Sequence: Synthetic peptide
  MOD_RES (6)..(6): Ser or Thr
  MOD_RES (10)..(10): Ile or Val
  MOD_RES (12)..(12): Ala, Gly, Ser or Thr
  MOD_RES (15)..(15): Phe, Leu or Tyr
ISCTGXSSDXGXYNXVSWYQ

SEQ ID NO: 558 - protein, 20 aa, Artificial Sequence
  Description of Artificial Sequence: Synthetic peptide
  MOD_RES (6)..(6): Ser or Thr
  MOD_RES (10)..(10): Ile or Val
  MOD_RES (12)..(12): Ala, Gly, Ser or Thr
  MOD_RES (15)..(15): Phe, Leu or Tyr
ISCTGXSSDXGXYNXVSWYQ

SEQ ID NO: 559 - protein, 20 aa, Artificial Sequence
  Description of Artificial Sequence: Synthetic peptide
  MOD_RES (10)..(10): Ile or Val
  MOD_RES (12)..(12): Ala, Asp, Gly, Asn, Ser or Thr
  MOD_RES (14)..(14): Asp or Asn
  MOD_RES (15)..(15): Phe, Leu or Tyr
ISCTGTSSDXGXYXXVSWYQ

SEQ ID NO: 560 - protein, 20 aa, Artificial Sequence
  Description of Artificial Sequence: Synthetic peptide
  MOD_RES (6)..(6): Ser or Thr
  MOD_RES (10)..(10): Ile or Val
  MOD_RES (12)..(12): Ala, Gly, Ser or Thr
  MOD_RES (15)..(15): Phe, Leu or Tyr
ISCTGXSSDXGXYNXVSWYQ

SEQ ID NO: 561 - protein, 21 aa, Artificial Sequence
  Description of Artificial Sequence: Synthetic peptide
  MOD_RES (7)..(7): Glu or Gln
  MOD_RES (10)..(10): Ala, Asp, Ser or Tyr
  MOD_RES (11)..(11): Ser or Thr
  MOD_RES (12)..(12): Ser or Tyr
  MOD_RES (14)..(14): Asn or Tyr
  MOD_RES (16)..(16): Phe or Tyr
ISCRASXSVXXXGXSXMHWYQ

SEQ ID NO: 562 - protein, 21 aa, Artificial Sequence
  Description of Artificial Sequence: Synthetic peptide
  MOD_RES (7)..(7): Glu, Lys or Gln
  MOD_RES (10)..(10): Ala, Asp, Ser or Tyr
  MOD_RES (11)..(11): Ser or Thr
  MOD_RES (12)..(12): Ser or Tyr
  MOD_RES (16)..(16): Phe or Tyr
ISCRASXSVXXXGYSXMHWYQ

SEQ ID NO: 563 - protein, 22 aa, Artificial Sequence
  Description of Artificial Sequence: Synthetic peptide
  MOD_RES (10)..(10): Leu or Val
  MOD_RES (13)..(13): Asp or Asn
  MOD_RES (15)..(15): Lys or Asn
  MOD_RES (19)..(19): Ala, Pro, Ser, Thr, Asp, Glu, His, Lys, Asn, Gln or Tyr
ISCRSSQSLXHSXGXTYLXWYL

SEQ ID NO: 564 - protein, 22 aa, Artificial Sequence
  Description of Artificial Sequence: Synthetic peptide
  MOD_RES (10)..(10): Leu or Val
  MOD_RES (13)..(13): Asp or Asn
  MOD_RES (15)..(15): Lys or Asn
  MOD_RES (19)..(19): Ala, Pro, Ser, Thr, Asp, Glu, His, Lys, Asn, Gln or Tyr
ISCRSSQSLXHSXGXTYLXWYL

SEQ ID NO: 565 - protein, 23 aa, Artificial Sequence
  Description of Artificial Sequence: Synthetic peptide
  MOD_RES (9)..(9): Leu or Val
  MOD_RES (11)..(11): Asn or Tyr
  MOD_RES (13)..(13): Gly, Arg or Ser
  MOD_RES (15)..(15): Arg, His, Lys, Asn, Gln or Ser
INCKSSQSXLXSXNXKNYLAWYQ

SEQ ID NO: 566 - protein, 13 aa, Artificial Sequence
  Description of Artificial Sequence: Synthetic peptide
  MOD_RES (4)..(4): Ala, Gly, Thr, Asp, Glu, Lys, Asn, Arg or Ser
  MOD_RES (8)..(8): Leu or Arg
  MOD_RES (9)..(9): Ala, Glu, Pro or Gln
LIYXASNXXSGVP

SEQ ID NO: 567 - protein, 14 aa, Artificial Sequence
  Description of Artificial Sequence: Synthetic peptide
  MOD_RES (6)..(7): Ser or Tyr
  MOD_RES (8)..(8): Gly, Asp, Glu, Lys, Asn, Arg or Ser
  MOD_RES (9)..(10): Phe, His, Leu, Pro, Ser or Tyr
YYCQQXXXXXTFGG

SEQ ID NO: 568 - protein, 14 aa, Artificial Sequence
  Description of Artificial Sequence: Synthetic peptide
  MOD_RES (7)..(7): Ser or Tyr
  MOD_RES (8)..(8): Gly, Asp, Glu, Lys, Asn, Arg or Ser
  MOD_RES (9)..(10): Phe, His, Leu, Pro, Ser or Tyr
YYCQQWXXXXTFGG

SEQ ID NO: 569 - protein, 14 aa, Artificial Sequence
  Description of Artificial Sequence: Synthetic peptide
  MOD_RES (6)..(6): Ser or Tyr
  MOD_RES (7)..(7): Ala, Asp, Gly, His, Asn, Pro, Arg, Ser or Thr
  MOD_RES (8)..(8): Gly, Asp, Glu, Lys, Asn, Arg or Ser
  MOD_RES (9)..(10): Phe, His, Leu, Pro, Ser or Tyr
YYCQQXXXXXTFGG

SEQ ID NO: 570 - protein, 14 aa, Artificial Sequence
  Description of Artificial Sequence: Synthetic peptide
  MOD_RES (7)..(7): Ala, Asp, Gly, His, Asn, Pro, Arg, Ser or Thr
  MOD_RES (8)..(8): Gly, Asp, Glu, Lys, Asn, Arg or Ser
  MOD_RES (9)..(10): Phe, His, Leu, Pro, Ser or Tyr
YYCQQWXXXXTFGG

SEQ ID NO: 571 - protein, 14 aa, Artificial Sequence
  Description of Artificial Sequence: Synthetic peptide
  MOD_RES (6)..(7): Ser or Tyr
  MOD_RES (8)..(8): Gly, Asp, Glu, Lys, Asn, Arg or Ser
  MOD_RES (9)..(9): Phe, His, Leu, Pro, Ser or Tyr
YYCQQXXXXWTFGG

SEQ ID NO: 572 - protein, 14 aa, Artificial Sequence
  Description of Artificial Sequence: Synthetic peptide
  MOD_RES (7)..(7): Ser or Tyr
  MOD_RES (8)..(8): Gly, Asp, Glu, Lys, Asn, Arg or Ser
  MOD_RES (9)..(9): Phe, His, Leu, Pro, Ser or Tyr
YYCQQWXXXWTFGG

SEQ ID NO: 573 - protein, 14 aa, Artificial Sequence
  Description of Artificial Sequence: Synthetic peptide
  MOD_RES (6)..(6): Ser or Tyr
  MOD_RES (7)..(7): Ala, Asp, Gly, His, Asn, Pro, Arg, Ser or Thr
  MOD_RES (8)..(8): Gly, Asp, Glu, Lys, Asn, Arg or Ser
  MOD_RES (9)..(9): Phe, His, Leu, Pro, Ser or Tyr
YYCQQXXXXWTFGG

SEQ ID NO: 574 - protein, 14 aa, Artificial Sequence
  Description of Artificial Sequence: Synthetic peptide
  MOD_RES (7)..(7): Ala, Asp, Gly, His, Asn, Pro, Arg, Ser or Thr
  MOD_RES (8)..(8): Gly, Asp, Glu, Lys, Asn, Arg or Ser
  MOD_RES (9)..(9): Phe, His, Leu, Pro, Ser or Tyr
YYCQQWXXXWTFGG

SEQ ID NO: 575 - protein, 15 aa, Artificial Sequence
  Description of Artificial Sequence: Synthetic peptide
  MOD_RES (7)..(7): Ser or Tyr
  MOD_RES (9)..(9): Ser, Phe, Leu or Tyr
  MOD_RES (11)..(11): Arg or Trp
YYCQQGXSXPXTFGG

SEQ ID NO: 576 - protein, 15 aa, Artificial Sequence
  Description of Artificial Sequence: Synthetic peptide
  MOD_RES (6)..(6): Ser or Tyr
  MOD_RES (7)..(7): Ala, Asp, Gly, Asn, Ser or Thr
  MOD_RES (9)..(9): Ser, Phe, Leu or Tyr
  MOD_RES (11)..(11): Arg or Trp
YYCQQXXSXPXTFGG

SEQ ID NO: 577 - protein, 15 aa, Artificial Sequence
  Description of Artificial Sequence: Synthetic peptide
  MOD_RES (7)..(7): Ala, Asp, Gly, Asn, Ser or Thr
  MOD_RES (9)..(9): Ser, Phe, Leu or Tyr
  MOD_RES (11)..(11): Arg or Trp
YYCQQGXSXPXTFGG

SEQ ID NO: 578 - protein, 15 aa, Artificial Sequence
  Description of Artificial Sequence: Synthetic peptide
  MOD_RES (6)..(7): Ser or Tyr
  MOD_RES (9)..(9): Ala, Gly, Leu, Met, Arg, Ser, Thr, Val or Trp
  MOD_RES (11)..(11): Arg or Trp
YYCQQXXSXPXTFGG

SEQ ID NO: 579 - protein, 15 aa, Artificial Sequence
  Description of Artificial Sequence: Synthetic peptide
  MOD_RES (7)..(7): Ser or Tyr
  MOD_RES (9)..(9): Ala, Gly, Leu, Met, Arg, Ser, Thr, Val or Trp
  MOD_RES (11)..(11): Arg or Trp
YYCQQGXSXPXTFGG

SEQ ID NO: 580 - protein, 15 aa, Artificial Sequence
  Description of Artificial Sequence: Synthetic peptide
  MOD_RES (6)..(6): Ser or Tyr
  MOD_RES (7)..(7): Ala, Asp, Gly, Asn, Ser or Thr
  MOD_RES (9)..(9): Ala, Gly, Leu, Met, Arg, Ser, Thr, Val or Trp
  MOD_RES (11)..(11): Arg or Trp
YYCQQXXSXPXTFGG

SEQ ID NO: 581 - protein, 15 aa, Artificial Sequence
  Description of Artificial Sequence: Synthetic peptide
  MOD_RES (7)..(7): Ala, Asp, Gly, Asn, Ser or Thr
  MOD_RES (9)..(9): Ala, Gly, Leu, Met, Arg, Ser, Thr, Val or Trp
  MOD_RES (11)..(11): Arg or Trp
YYCQQGXSXPXTFGG

SEQ ID NO: 582 - protein, 15 aa, Artificial Sequence
  Description of Artificial Sequence: Synthetic peptide
  MOD_RES (6)..(7): Ser or Tyr
  MOD_RES (9)..(9): Ser, Phe, Leu or Tyr
  MOD_RES (11)..(11): Phe, His, Leu, Pro, Ser or Tyr
YYCQQXXSXPXTFGG

SEQ ID NO: 583 - protein, 15 aa, Artificial Sequence
  Description of Artificial Sequence: Synthetic peptide
  MOD_RES (7)..(7): Ser or Tyr
  MOD_RES (9)..(9): Ser, Phe, Leu or Tyr
  MOD_RES (11)..(11): Phe, His, Leu, Pro, Ser or Tyr
YYCQQGXSXPXTFGG

SEQ ID NO: 584 - protein, 15 aa, Artificial Sequence
  Description of Artificial Sequence: Synthetic peptide
  MOD_RES (6)..(6): Ser or Tyr
  MOD_RES (7)..(7): Ala, Asp, Gly, Asn, Ser or Thr
  MOD_RES (9)..(9): Ser, Phe, Leu or Tyr
  MOD_RES (11)..(11): Phe, His, Leu, Pro, Ser or Tyr
YYCQQXXSXPXTFGG

SEQ ID NO: 585 - protein, 15 aa, Artificial Sequence
  Description of Artificial Sequence: Synthetic peptide
  MOD_RES (7)..(7): Ala, Asp, Gly, Asn, Ser or Thr
  MOD_RES (9)..(9): Ser, Phe, Leu or Tyr
  MOD_RES (11)..(11): Phe, His, Leu, Pro, Ser or Tyr
YYCQQGXSXPXTFGG

SEQ ID NO: 586 - protein, 15 aa, Artificial Sequence
  Description of Artificial Sequence: Synthetic peptide
  MOD_RES (6)..(7): Ser or Tyr
  MOD_RES (9)..(9): Ala, Gly, Leu, Met, Arg, Ser, Thr, Val or Trp
  MOD_RES (11)..(11): Phe, His, Leu, Pro, Ser or Tyr
YYCQQXXSXPXTFGG

SEQ ID NO: 587 - protein, 15 aa, Artificial Sequence
  Description of Artificial Sequence: Synthetic peptide
  MOD_RES (7)..(7): Ser or Tyr
  MOD_RES (9)..(9): Ala, Gly, Leu, Met, Arg, Ser, Thr, Val or Trp
  MOD_RES (11)..(11): Phe, His, Leu, Pro, Ser or Tyr
YYCQQGXSXPXTFGG

SEQ ID NO: 588 - protein, 15 aa, Artificial Sequence
  Description of Artificial Sequence: Synthetic peptide
  MOD_RES (6)..(6): Ser or Tyr
  MOD_RES (7)..(7): Ala, Asp, Gly, Asn, Ser or Thr
  MOD_RES (9)..(9): Ala, Gly, Leu, Met, Arg, Ser, Thr, Val or Trp
  MOD_RES (11)..(11): Phe, His, Leu, Pro, Ser or Tyr
YYCQQXXSXPXTFGG

SEQ ID NO: 589 - protein, 15 aa, Artificial Sequence
  Description of Artificial Sequence: Synthetic peptide
  MOD_RES (7)..(7): Ala, Asp, Gly, Asn, Ser or Thr
  MOD_RES (9)..(9): Ala, Gly, Leu, Met, Arg, Ser, Thr, Val or Trp
  MOD_RES (11)..(11): Phe, His, Leu, Pro, Ser or Tyr
YYCQQGXSXPXTFGG

SEQ ID NO: 590 - protein, 15 aa, Artificial Sequence
  Description of Artificial Sequence: Synthetic peptide
  MOD_RES (6)..(7): Ser or Tyr
  MOD_RES (9)..(9): Ser, Phe, Leu or Tyr
  MOD_RES (11)..(11): Arg or Trp
YYCQQXXSXPXTFGG

SEQ ID NO: 591 - protein, 15 aa, Artificial Sequence
  Description of Artificial Sequence: Synthetic peptide
  MOD_RES (7)..(7): Ser or Tyr
  MOD_RES (9)..(9): Asn, Ser, Thr or Tyr
  MOD_RES (11)..(11): Phe, Leu or Tyr
  MOD_RES (12)..(12): Ala, Ile, Thr or Val
YYCQQYXSXPXXFGG

SEQ ID NO: 592 - protein, 15 aa, Artificial Sequence
  Description of Artificial Sequence: Synthetic peptide
  MOD_RES (7)..(7): Ser or Tyr
  MOD_RES (9)..(9): Asn, Ser, Thr or Tyr
  MOD_RES (11)..(11): Phe, Leu or Tyr
  MOD_RES (12)..(12): Ala, Ile, Thr or Val
YYCQQWXSXPXXFGG

SEQ ID NO: 593 - protein, 15 aa, Artificial Sequence
  Description of Artificial Sequence: Synthetic peptide
  MOD_RES (7)..(7): Asp, Gly, Asn or Ser
  MOD_RES (9)..(9): Asn, Ser, Thr or Tyr
  MOD_RES (11)..(11): Phe, Leu or Tyr
  MOD_RES (12)..(12): Ala, Ile, Thr or Val
YYCQQYXSXPXXFGG

SEQ ID NO: 594 - protein, 15 aa, Artificial Sequence
  Description of Artificial Sequence: Synthetic peptide
  MOD_RES (7)..(7): Asp, Gly, Asn or Ser
  MOD_RES (9)..(9): Asn, Ser, Thr or Tyr
  MOD_RES (11)..(11): Phe, Leu or Tyr
  MOD_RES (12)..(12): Ala, Ile, Thr or Val
YYCQQWXSXPXXFGG

SEQ ID NO: 595 - protein, 15 aa, Artificial Sequence
  Description of Artificial Sequence: Synthetic peptide
  MOD_RES (7)..(7): Ser or Tyr
  MOD_RES (9)..(9): Asn, Ser, Thr or Tyr
  MOD_RES (11)..(11): Leu, Gly, Arg, Val or Trp
  MOD_RES (12)..(12): Ala, Ile, Thr or Val
YYCQQYXSXPXXFGG

SEQ ID NO: 596 - protein, 15 aa, Artificial Sequence
  Description of Artificial Sequence: Synthetic peptide
  MOD_RES (7)..(7): Ser or Tyr
  MOD_RES (9)..(9): Asn, Ser, Thr or Tyr
  MOD_RES (11)..(11): Leu, Gly, Arg, Val or Trp
  MOD_RES (12)..(12): Ala, Ile, Thr or Val
YYCQQWXSXPXXFGG

SEQ ID NO: 597 - protein, 15 aa, Artificial Sequence
  Description of Artificial Sequence: Synthetic peptide
  MOD_RES (7)..(7): Asp, Gly, Asn or Ser
  MOD_RES (9)..(9): Asn, Ser, Thr or Tyr
  MOD_RES (11)..(11): Leu, Gly, Arg, Val or Trp
  MOD_RES (12)..(12): Ala, Ile, Thr or Val
YYCQQYXSXPXXFGG

SEQ ID NO: 598 - protein, 15 aa, Artificial Sequence
  Description of Artificial Sequence: Synthetic peptide
  MOD_RES (7)..(7): Asp, Gly, Asn or Ser
  MOD_RES (9)..(9): Asn, Ser, Thr or Tyr
  MOD_RES (11)..(11): Leu, Gly, Arg, Val or Trp
  MOD_RES (12)..(12): Ala, Ile, Thr or Val
YYCQQWXSXPXXFGG

SEQ ID NO: 599 - protein, 16 aa, Artificial Sequence
  Description of Artificial Sequence: Synthetic peptide
  MOD_RES (4)..(5): Pro, Gln or Ser
  MOD_RES (7)..(7): Ala, Asp, Asn or Thr
  MOD_RES (10)..(10): His, Asn, Pro or Thr
  MOD_RES (11)..(11): Pro, Ser or Thr
  MOD_RES (12)..(12): Phe, Leu or Tyr
  MOD_RES (13)..(13): Ala, Met, Thr or Val
YYCXXYXSSXXXXFGG

SEQ ID NO: 600 - protein, 16 aa, Artificial Sequence
  Description of Artificial Sequence: Synthetic peptide
  MOD_RES (4)..(5): Pro, Gln or Ser
  MOD_RES (7)..(7): Ala, Asp, Asn or Thr
  MOD_RES (10)..(10): His, Asn, Pro or Thr
  MOD_RES (11)..(11): Pro, Ser or Thr
  MOD_RES (12)..(12): Gly, Leu, Val or Trp
  MOD_RES (13)..(13): Ala, Met, Thr or Val
YYCXXYXSSXXXXFGG

SEQ ID NO: 601 - protein, 16 aa, Artificial Sequence
  Description of Artificial Sequence: Synthetic peptide
  MOD_RES (5)..(5): Leu, Ala, Glu, Pro, Gln, Ser or Val
  MOD_RES (8)..(8): Gly or Ser
  MOD_RES (10)..(10): His, Asn, Pro, Ser, Thr or Tyr
  MOD_RES (11)..(11): Pro or Thr
  MOD_RES (12)..(12): Phe, Leu or Tyr
  MOD_RES (13)..(13): Ala, Met, Thr or Val
YYCQXYDXSXXXXFGG

SEQ ID NO: 602 - protein, 16 aa, Artificial Sequence
  Description of Artificial Sequence: Synthetic peptide
  MOD_RES (5)..(5): Leu, Ala, Glu, Pro, Gln, Ser or Val
  MOD_RES (8)..(8): Gly or Ser
  MOD_RES (10)..(10): His, Asn, Pro, Ser, Thr or Tyr
  MOD_RES (11)..(11): Pro or Thr
  MOD_RES (12)..(12): Phe, Leu or Tyr
  MOD_RES (13)..(13): Ala, Met, Thr or Val
YYCQXWDXSXXXXFGG

SEQ ID NO: 603 - protein, 16 aa, Artificial Sequence
  Description of Artificial Sequence: Synthetic peptide
  MOD_RES (5)..(5): Leu, Ala, Glu, Pro, Gln, Ser or Val
  MOD_RES (8)..(8): Gly or Ser
  MOD_RES (10)..(10): His, Asn, Pro, Ser, Thr or Tyr
  MOD_RES (11)..(11): Pro or Thr
  MOD_RES (12)..(12): Gly, Leu, Val or Trp
  MOD_RES (13)..(13): Ala, Met, Thr or Val
YYCQXYDXSXXXXFGG

SEQ ID NO: 604 - protein, 16 aa, Artificial Sequence
  Description of Artificial Sequence: Synthetic peptide
  MOD_RES (5)..(5): Leu, Ala, Glu, Pro, Gln, Ser or Val
  MOD_RES (8)..(8): Gly or Ser
  MOD_RES (10)..(10): His, Asn, Pro, Ser, Thr or Tyr
  MOD_RES (11)..(11): Pro or Thr
  MOD_RES (12)..(12): Gly, Leu, Val or Trp
  MOD_RES (13)..(13): Ala, Met, Thr or Val
YYCQXWDXSXXXXFGG

SEQ ID NO: 605 - protein, 17 aa, Artificial Sequence
  Description of Artificial Sequence: Synthetic peptide
  MOD_RES (4)..(4): Ala, Glu, Pro or Gln
  MOD_RES (5)..(5): Ala or Ser
  MOD_RES (8)..(8): Ala, Asp, Ser or Tyr
  MOD_RES (10)..(10): Leu or Ser
  MOD_RES (11)..(11): Asp, Gly, Asn or Ser
  MOD_RES (12)..(12): Ala, Asp, Gly, His, Pro or Arg
YYCXXYDXSXXXYVFGG

SEQ ID NO: 606 - protein, 17 aa, Artificial Sequence
  Description of Artificial Sequence: Synthetic peptide
  MOD_RES (4)..(4): Ala, Glu, Pro or Gln
  MOD_RES (5)..(5): Ala or Ser
  MOD_RES (8)..(8): Ala, Asp, Ser or Tyr
  MOD_RES (10)..(10): Leu or Ser
  MOD_RES (11)..(11): Asp, Gly, Asn or Ser
  MOD_RES (12)..(12): Ala, Asp, Gly, His, Pro or Arg
YYCXXWDXSXXXYVFGG

SEQ ID NO: 607 - protein, 17 aa, Artificial Sequence
  Description of Artificial Sequence: Synthetic peptide
  MOD_RES (4)..(4): Ala, Glu, Pro or Gln
  MOD_RES (5)..(5): Ala or Ser
  MOD_RES (8)..(8): Ala, Asp, Ser or Tyr
  MOD_RES (10)..(10): Leu or Ser
  MOD_RES (11)..(11): Asp, Gly, Asn or Ser
  MOD_RES (12)..(12): Ala, Asp, Gly, His, Pro or Arg
  MOD_RES (13)..(13): Gly, Leu, Val or Trp
YYCXXYDXSXXXXVFGG

SEQ ID NO: 608 - protein, 17 aa, Artificial Sequence
  Description of Artificial Sequence: Synthetic peptide
  MOD_RES (4)..(4): Ala, Glu, Pro or Gln
  MOD_RES (5)..(5): Ala or Ser
  MOD_RES (8)..(8): Ala, Asp, Ser or Tyr
  MOD_RES (10)..(10): Leu or Ser
  MOD_RES (11)..(11): Asp, Gly, Asn or Ser
  MOD_RES (12)..(12): Ala, Asp, Gly, His, Pro or Arg
  MOD_RES (13)..(13): Gly, Leu, Val or Trp
YYCXXWDXSXXXXVFGG

SEQ ID NO: 609 - protein, 17 aa, Artificial Sequence
  Description of Artificial Sequence: Synthetic peptide
  MOD_RES (8)..(8): Asn or Ser
  MOD_RES (10)..(10): Leu, Ala, Gly, Pro, Arg, Ser or Val
  MOD_RES (11)..(11): Ala, Asp, His, Asn, Pro, Ser, Thr or Tyr
  MOD_RES (12)..(12): Ala, Asp, Gly, His, Ile, Leu, Asn, Pro, Arg, Ser, Thr or Val
  MOD_RES (13)..(13): Asp, Phe, Val or Tyr
YYCQSYDXSXXXXVFGG

SEQ ID NO: 610 - protein, 17 aa, Artificial Sequence
  Description of Artificial Sequence: Synthetic peptide
  MOD_RES (8)..(8): Asn or Ser
  MOD_RES (10)..(10): Leu, Ala, Gly, Pro, Arg, Ser or Val
  MOD_RES (11)..(11): Ala, Asp, His, Asn, Pro, Ser, Thr or Tyr
  MOD_RES (12)..(12): Ala, Asp, Gly, His, Ile, Leu, Asn, Pro, Arg, Ser, Thr or Val
  MOD_RES (13)..(13): Asp, Phe, Val or Tyr
YYCQSWDXSXXXXVFGG

SEQ ID NO: 611 - protein, 14 aa, Artificial Sequence
  Description of Artificial Sequence: Synthetic peptide
  MOD_RES (6)..(7): Ser or Tyr
  MOD_RES (8)..(8): Asn or Ser
  MOD_RES (9)..(10): Phe, His, Leu, Pro, Ser or Tyr
YYCQQXXXXXTFGG

SEQ ID NO: 612 - protein, 14 aa, Artificial Sequence
  Description of Artificial Sequence: Synthetic peptide
  MOD_RES (6)..(6): Ser or Tyr
  MOD_RES (7)..(7): Asp, Gly, His, Asn, Arg or Ser
  MOD_RES (8)..(8): Asn, Ser, Thr or Tyr
  MOD_RES (9)..(10): Phe, His, Leu, Pro, Ser or Tyr
YYCQQXXXXXTFGG

SEQ ID NO: 613 - protein, 14 aa, Artificial Sequence
  Description of Artificial Sequence: Synthetic peptide
  MOD_RES (6)..(7): Ser or Tyr
  MOD_RES (8)..(8): Asn or Ser
  MOD_RES (10)..(10): Phe, His, Leu, Pro, Ser or Tyr
YYCQQXXXWXTFGG

SEQ ID NO: 614 - protein, 14 aa, Artificial Sequence
  Description of Artificial Sequence: Synthetic peptide
  MOD_RES (6)..(6): Ser or Tyr
  MOD_RES (7)..(7): Asp, Gly, His, Asn, Arg or Ser
  MOD_RES (8)..(8): Asn or Ser
  MOD_RES (10)..(10): Phe, His, Leu, Pro, Ser or Tyr
YYCQQXXXWXTFGG

SEQ ID NO: 615 - protein, 14 aa, Artificial Sequence
  Description of Artificial Sequence: Synthetic peptide
  MOD_RES (6)..(7): Ser or Tyr
  MOD_RES (8)..(8): Asn or Ser
  MOD_RES (9)..(9): Leu, Pro, Ser, Phe, His, Gln or Tyr
YYCQQXXXXWTFGG

SEQ ID NO: 616 - protein, 14 aa, Artificial Sequence
  Description of Artificial Sequence: Synthetic peptide
  MOD_RES (6)..(6): Ser or Tyr
  MOD_RES (7)..(7): Asp, Gly, His, Asn, Arg or Ser
  MOD_RES (8)..(8): Asn or Ser
  MOD_RES (9)..(9): Phe, His, Leu, Pro, Ser or Tyr
YYCQQXXXXWTFGG

SEQ ID NO: 617 - protein, 14 aa, Artificial Sequence
  Description of Artificial Sequence: Synthetic peptide
  MOD_RES (6)..(7): Ser or Tyr
  MOD_RES (8)..(8): Asn or Ser
YYCQQXXXWWTFGG

SEQ ID NO: 618 - protein, 14 aa, Artificial Sequence
  Description of Artificial Sequence: Synthetic peptide
  MOD_RES (6)..(6): Ser or Tyr
  MOD_RES (7)..(7): Asp, Gly, His, Asn, Arg or Ser
  MOD_RES (8)..(8): Asn or Ser
YYCQQXXXWWTFGG

SEQ ID NO: 619 - protein, 15 aa, Artificial Sequence
  Description of Artificial Sequence: Synthetic peptide
  MOD_RES (6)..(6): His, Pro, Ser or Tyr
  MOD_RES (7)..(7): Lys, Asn, Arg or Ser
  MOD_RES (8)..(8): Arg, Gly, Asp, Glu, His, Lys, Asn, Gln or Ser
  MOD_RES (9)..(9): Phe, His, Ile, Leu, Asn or Tyr
  MOD_RES (11)..(11): Leu or Trp
YYCQQXXXXPXTFGG

SEQ ID NO: 620 - protein, 15 aa, Artificial Sequence
  Description of Artificial Sequence: Synthetic peptide
  MOD_RES (7)..(7): Lys, Asn, Arg or Ser
  MOD_RES (8)..(8): Arg, Gly, Asp, Glu, His, Lys, Asn, Gln or Ser
  MOD_RES (9)..(9): Phe, His, Ile, Leu, Asn or Tyr
  MOD_RES (11)..(11): Leu or Trp
YYCQQWXXXPXTFGG

SEQ ID NO: 621 - protein, 15 aa, Artificial Sequence
  Description of Artificial Sequence: Synthetic peptide
  MOD_RES (6)..(6): His, Pro, Ser or Tyr
  MOD_RES (7)..(7): Lys, Asn, Arg or Ser
  MOD_RES (8)..(8): Arg, Gly, Asp, Glu, His, Lys, Asn, Gln or Ser
  MOD_RES (9)..(9): Ala, Gly, Leu, Met, Arg, Ser, Thr, Val or Trp
  MOD_RES (11)..(11): Leu or Trp
YYCQQXXXXPXTFGG

SEQ ID NO: 622 - protein, 15 aa, Artificial Sequence
  Description of Artificial Sequence: Synthetic peptide
  MOD_RES (7)..(7): Lys, Asn, Arg or Ser
  MOD_RES (8)..(8): Arg, Gly, Asp, Glu, His, Lys, Asn, Gln or Ser
  MOD_RES (9)..(9): Ala, Gly, Leu, Met, Arg, Ser, Thr, Val or Trp
  MOD_RES (11)..(11): Leu or Trp
YYCQQWXXXPXTFGG

SEQ ID NO: 623 - protein, 15 aa, Artificial Sequence
  Description of Artificial Sequence: Synthetic peptide
  MOD_RES (7)..(7): Ser or Tyr
  MOD_RES (8)..(8): Asn or Ser
  MOD_RES (9)..(9): Asn, Ser, Thr or Tyr
  MOD_RES (11)..(11): Phe, Leu, Pro or Ser
  MOD_RES (12)..(12): Ala, Ile, Thr or Val
YYCQQYXXXPXXFGG

SEQ ID NO: 624 - protein, 15 aa, Artificial Sequence
  Description of Artificial Sequence: Synthetic peptide
  MOD_RES (7)..(7): Ser or Tyr
  MOD_RES (8)..(8): Asn or Ser
  MOD_RES (9)..(9): Asn, Ser, Thr or Tyr
  MOD_RES (11)..(11): Phe, Leu, Pro or Ser
  MOD_RES (12)..(12): Ala, Ile, Thr or Val
YYCQQWXXXPXXFGG

SEQ ID NO: 625 - protein, 15 aa, Artificial Sequence
  Description of Artificial Sequence: Synthetic peptide
  MOD_RES (7)..(7): Asp, Gly, Asn or Ser
  MOD_RES (8)..(8): Asn or Ser
  MOD_RES (9)..(9): Asn, Ser, Thr or Tyr
  MOD_RES (11)..(11): Phe, Leu, Pro or Ser
  MOD_RES (12)..(12): Ala, Ile, Thr or Val
YYCQQYXXXPXXFGG

SEQ ID NO: 626 - protein, 15 aa, Artificial Sequence
  Description of Artificial Sequence: Synthetic peptide
  MOD_RES (7)..(7): Asp, Gly, Asn or Ser
  MOD_RES (8)..(8): Asn or Ser
  MOD_RES (9)..(9): Asn, Ser, Thr or Tyr
  MOD_RES (11)..(11): Phe, Leu, Pro or Ser
  MOD_RES (12)..(12): Ala, Ile, Thr or Val
YYCQQWXXXPXXFGG

SEQ ID NO: 627 - protein, 15 aa, Artificial Sequence
  Description of Artificial Sequence: Synthetic peptide
  MOD_RES (7)..(7): Ser or Tyr
  MOD_RES (8)..(8): Asn or Ser
  MOD_RES (9)..(9): Asn, Ser, Thr or Tyr
  MOD_RES (11)..(11): Leu, Gly, Arg, Val or Trp
  MOD_RES (12)..(12): Ala, Ile, Thr or Val
YYCQQYXXXPXXFGG

SEQ ID NO: 628 - protein, 15 aa, Artificial Sequence
  Description of Artificial Sequence: Synthetic peptide
  MOD_RES (7)..(7): Ser or Tyr
  MOD_RES (8)..(8): Asn or Ser
  MOD_RES (9)..(9): Asn, Ser, Thr or Tyr
  MOD_RES (11)..(11): Leu, Gly, Arg, Val or Trp
  MOD_RES (12)..(12): Ala, Ile, Thr or Val
YYCQQWXXXPXXFGG

SEQ ID NO: 629 - protein, 15 aa, Artificial Sequence
  Description of Artificial Sequence: Synthetic peptide
  MOD_RES (7)..(7): Asp, Gly, Asn or Ser
  MOD_RES (8)..(8): Asn or Ser
  MOD_RES (9)..(9): Asn, Ser, Thr or Tyr
  MOD_RES (11)..(11): Leu, Gly, Arg, Val or Trp
  MOD_RES (12)..(12): Ala, Ile, Thr or Val
YYCQQYXXXPXXFGG

SEQ ID NO: 630 - protein, 15 aa, Artificial Sequence
  Description of Artificial Sequence: Synthetic peptide
  MOD_RES (7)..(7): Asp, Gly, Asn or Ser
  MOD_RES (8)..(8): Asn or Ser
  MOD_RES (9)..(9): Asn, Ser, Thr or Tyr
  MOD_RES (11)..(11): Leu, Gly, Arg, Val or Trp
  MOD_RES (12)..(12): Ala, Ile, Thr or Val
YYCQQWXXXPXXFGG

SEQ ID NO: 631 - protein, 16 aa, Artificial Sequence
  Description of Artificial Sequence: Synthetic peptide
  MOD_RES (4)..(5): Pro, Gln or Ser
  MOD_RES (7)..(7): Ala, Asp, Gly, Asn, Ser or Thr
  MOD_RES (10)..(10): His, Asn, Pro or Thr
  MOD_RES (11)..(11): Pro, Ser or Thr
  MOD_RES (12)..(12): Phe or Leu
  MOD_RES (13)..(13): Ala, Met, Thr or Val
YYCXXYXSSXXXXFGG

SEQ ID NO: 632 - protein, 16 aa, Artificial Sequence
  Description of Artificial Sequence: Synthetic peptide
  MOD_RES (4)..(5): Pro, Gln or Ser
  MOD_RES (7)..(7): Ala, Asp, Gly, Asn, Ser or Thr
  MOD_RES (10)..(10): His, Asn, Pro or Thr
  MOD_RES (11)..(11): Pro, Ser or Thr
  MOD_RES (12)..(12): Gly, Leu, Val or Trp
  MOD_RES (13)..(13): Ala, Met, Thr or Val
YYCXXYXSSXXXXFGG

SEQ ID NO: 633 - protein, 16 aa, Artificial Sequence
  Description of Artificial Sequence: Synthetic peptide
  MOD_RES (5)..(5): Pro, Gln or Ser
  MOD_RES (7)..(7): Ser or Tyr
  MOD_RES (9)..(9): Asn or Ser
  MOD_RES (12)..(12): Gly, Leu, Val or Trp
  MOD_RES (13)..(13): Ala, Ile, Thr or Val
YYCQXYXSXPPXXFGG

SEQ ID NO: 634 - protein, 16 aa, Artificial Sequence
  Description of Artificial Sequence: Synthetic peptide
  MOD_RES (5)..(5): Pro, Gln, Ser, His or Tyr
  MOD_RES (7)..(7): Ser or Tyr
  MOD_RES (9)..(9): Asn or Ser
  MOD_RES (12)..(12): Gly, Leu, Val or Trp
  MOD_RES (13)..(13): Ala, Ile, Thr or Val
YYCQXWXSXPPXXFGG

SEQ ID NO: 635 - protein, 16 aa, Artificial Sequence
  Description of Artificial Sequence: Synthetic peptide
  MOD_RES (5)..(5): Pro, Gln or Ser
  MOD_RES (7)..(7): Asp, Gly, Asn or Ser
  MOD_RES (9)..(9): Asn or Ser
  MOD_RES (12)..(12): Gly, Leu, Val or Trp
  MOD_RES (13)..(13): Ala, Ile, Thr or Val
YYCQXYXSXPPXXFGG

SEQ ID NO: 636 - protein, 16 aa, Artificial Sequence
  Description of Artificial Sequence: Synthetic peptide
  MOD_RES (5)..(5): Pro, Gln or Ser
  MOD_RES (7)..(7): Asp, Gly, Asn or Ser
  MOD_RES (9)..(9): Asn or Ser
  MOD_RES (12)..(12): Gly, Leu, Val or Trp
  MOD_RES (13)..(13): Ala, Ile, Thr or Val
YYCQXWXSXPPXXFGG

SEQ ID NO: 637 - protein, 16 aa, Artificial Sequence
  Description of Artificial Sequence: Synthetic peptide
  MOD_RES (5)..(5): Pro, Gln or Ser
  MOD_RES (7)..(7): Ser or Tyr
  MOD_RES (9)..(9): Arg, Ser, Thr or Trp
  MOD_RES (12)..(12): Gly, Leu, Val or Trp
  MOD_RES (13)..(13): Ala, Ile, Thr or Val
YYCQXYXSXPPXXFGG

SEQ ID NO: 638 - protein, 16 aa, Artificial Sequence
  Description of Artificial Sequence: Synthetic peptide
  MOD_RES (5)..(5): Pro, Gln, Ser, His or Tyr
  MOD_RES (7)..(7): Ser or Tyr
  MOD_RES (9)..(9): Arg, Ser, Thr or Trp
  MOD_RES (12)..(12): Gly, Leu, Val or Trp
  MOD_RES (13)..(13): Ala, Ile, Thr or Val
YYCQXWXSXPPXXFGG

SEQ ID NO: 639 - protein, 16 aa, Artificial Sequence
  Description of Artificial Sequence: Synthetic peptide
  MOD_RES (5)..(5): Pro, Gln or Ser
  MOD_RES (7)..(7): Asp, Gly, Asn or Ser
  MOD_RES (9)..(9): Arg, Ser, Thr or Trp
  MOD_RES (12)..(12): Gly, Leu, Val or Trp
  MOD_RES (13)..(13): Ala, Ile, Thr or Val
YYCQXYXSXPPXXFGG

SEQ ID NO: 640 - protein, 16 aa, Artificial Sequence
  Description of Artificial Sequence: Synthetic peptide
  MOD_RES (5)..(5): Pro, Gln or Ser
  MOD_RES (7)..(7): Asp, Gly, Asn or Ser
  MOD_RES (9)..(9): Arg, Ser, Thr or Trp
  MOD_RES (12)..(12): Gly, Leu, Val or Trp
  MOD_RES (13)..(13): Ala, Ile, Thr or Val
YYCQXWXSXPPXXFGG

SEQ ID NO: 641 - protein, 17 aa, Artificial Sequence
  Description of Artificial Sequence: Synthetic peptide
  MOD_RES (4)..(4): Ala, Glu, Pro, Gln or Ser
  MOD_RES (5)..(5): Ala, Phe, Ile, Ser, Thr or Val
  MOD_RES (8)..(8): Ala, Asp, Ser or Tyr
  MOD_RES (11)..(11): Asp, Gly, Asn or Ser
  MOD_RES (12)..(12): Ala, Asp, Gly, His, Pro or Arg
  MOD_RES (13)..(13): His, Pro, Ser or Tyr
YYCXXWDXSLXXXVFGG

SEQ ID NO: 642 - protein, 17 aa, Artificial Sequence
  Description of Artificial Sequence: Synthetic peptide
  MOD_RES (4)..(4): Ala, Glu, Pro, Gln or Ser
  MOD_RES (5)..(5): Ala, Phe, Ile, Ser, Thr or Val
  MOD_RES (8)..(8): Ala, Asp, Ser or Tyr
  MOD_RES (11)..(11): Asp, Gly, Asn or Ser
  MOD_RES (12)..(12): Ala, Asp, Gly, His, Pro or Arg
  MOD_RES (13)..(13): Gly, Leu, Val or Trp
YYCXXWDXSLXXXVFGG

SEQ ID NO: 643 - protein, 17 aa, Artificial Sequence
  Description of Artificial Sequence: Synthetic peptide
  MOD_RES (5)..(5): Pro, Gln or Ser
  MOD_RES (7)..(7): Asp or Asn
  MOD_RES (8)..(8): Asn or Ser
  MOD_RES (9)..(9): Ser or Trp
  MOD_RES (11)..(11): Pro or Thr
  MOD_RES (12)..(12): Ala, Asp, Gly, His, Ile, Leu, Asn, Pro, Arg, Ser, Thr or Val
  MOD_RES (13)..(14): Any amino acid
YYCQXYXXXPXXXXFGG

SEQ ID NO: 644 - protein, 4 aa, Artificial Sequence
  Description of Artificial Sequence: Synthetic peptide
VGGC

SEQ ID NO: 645 - DNA, 32 bp, Artificial Sequence
  Description of Artificial Sequence: Synthetic primer
tttagtggtacctttctattctcactccgctg

SEQ ID NO: 646 - DNA, 32 bp, Artificial Sequence
  Description of Artificial Sequence: Synthetic primer
tagaaaggtaccactaaaggaattgcgaataa

SEQ ID NO: 647 - DNA, 55 bp, Artificial Sequence
  Description of Artificial Sequence: Synthetic primer
ggaattgtgagcggataacaatttaccggtcacacaggaaacagctatgaccatg

SEQ ID NO: 648 - DNA, 55 bp, Artificial Sequence
  Description of Artificial Sequence: Synthetic primer
catggtcatagctgtttcctgtgtgaccggtaaattgttatccgctcacaattcc

SEQ ID NO: 649 - protein, 6 aa, Artificial Sequence
  Description of Artificial Sequence: Synthetic 6xHis tag
HHHHHH

SEQ ID NO: 650 - DNA, 26 bp, Artificial Sequence
  Description of Artificial Sequence: Synthetic primer
accctcgttccgatgctaagcttcgc

SEQ ID NO: 651 - DNA, 21 bp, Artificial Sequence
  Description of Artificial Sequence: Synthetic primer
acgggcgcagtagtacactgc

SEQ ID NO: 652 - DNA, 24 bp, Artificial Sequence
  Description of Artificial Sequence: Synthetic primer
gtctcgagcgcaagcaccaaaggc

SEQ ID NO: 653 - DNA, 30 bp, Artificial Sequence
  Description of Artificial Sequence: Synthetic primer
catgtgtgagttttgtcacaagatttgggc

SEQ ID NO: 654 - DNA, 24 bp, Artificial Sequence
  Description of Artificial Sequence: Synthetic primer
gacactgcagtgtactactgcgcc

SEQ ID NO: 655 - DNA, 48 bp, Artificial Sequence
  Description of Artificial Sequence: Synthetic primer
accctcgttccgatgctaagcttcgctgacatccagatgacccagtct

SEQ ID NO: 656 - DNA, 21 bp, Artificial Sequence
  Description of Artificial Sequence: Synthetic primer
gaatacagatggtgcagccac

SEQ ID NO: 657 - DNA, 45 bp, Artificial Sequence
  Description of Artificial Sequence: Synthetic primer
accctcgttccgatgctaagcttcgctgaaatcgtgctgacccag

SEQ ID NO: 658 - DNA, 26 bp, Artificial Sequence
  Description of Artificial Sequence: Synthetic primer
cctttctattctcactcgctggatcc

SEQ ID NO: 659 - DNA, 23 bp, Artificial Sequence
  Description of Artificial Sequence: Synthetic primer
ggcagccttggctgacccagcac

SEQ ID NO: 660 - DNA, 27 bp, Artificial Sequence
  Description of Artificial Sequence: Synthetic primer
ggtggcggatcccacccagaaacgctg

SEQ ID NO: 661 - DNA, 34 bp, Artificial Sequence
  Description of Artificial Sequence: Synthetic primer
attaatgtcgacttaccaatgcttaatcagtgag

SEQ ID NO: 662 - DNA, 48 bp, Artificial Sequence
  Description of Artificial Sequence: Synthetic primer
cgtacggctcgagacagcggccgcacgggcgcagtagtacactgcagt

SEQ ID NO: 663 - DNA, 46 bp, Artificial Sequence
  Description of Artificial Sequence: Synthetic primer
ctcgttccgatgctaagcttcgctgacactgcagtgtactactgcg

SEQ ID NO: 664 - DNA, 50 bp, Artificial Sequence
  Description of Artificial Sequence: Synthetic primer
cgtacggctcgagacagcggccgctgtgtgagttttgtcacaagatttgg

SEQ ID NO: 665 - DNA, 45 bp, Artificial Sequence
  Description of Artificial Sequence: Synthetic primer
cgtacggctcgagacagcggccgcgaatacagatggtgcagccac

SEQ ID NO: 666 - DNA, 48 bp, Artificial Sequence
  Description of Artificial Sequence: Synthetic primer
accctcgttccgatgctaagcttcgctcagtctgtgctgacccagcca

SEQ ID NO: 667 - DNA, 46 bp, Artificial Sequence
  Description of Artificial Sequence: Synthetic primer
ccgtacggctcgagacagcggccgccagcacggtcagcttggtacc

SEQ ID NO: 668 - DNA, 42 bp, Artificial Sequence
  Description of Artificial Sequence: Synthetic primer
ctcgttccgatgctaagcttcgctcagtctgtgctgacccag

SEQ ID NO: 669 - DNA, 38 bp, Artificial Sequence
  Description of Artificial Sequence: Synthetic primer
tctcactccgctggatccgaagtgcagctgctggaatc

SEQ ID NO: 670 - DNA, 21 bp, Artificial Sequence
  Description of Artificial Sequence: Synthetic primer
acgggcgcagtagtacactgc

SEQ ID NO: 671 - DNA, 46 bp, Artificial Sequence
  Description of Artificial Sequence: Synthetic primer
gtcgtatggataagcggccgctgtgtgagttttgtcacaagatttg

SEQ ID NO: 672 - DNA, 45 bp, Artificial Sequence
  Description of Artificial Sequence: Synthetic primer
gcctttggtgcttgcgctcgagacagtcaccagcgtaccctgacc

SEQ ID NO: 673 - DNA, 22 bp, Artificial Sequence
  Description of Artificial Sequence: Synthetic primer
ccagccaccctgtctctgtctc

SEQ ID NO: 674 - DNA, 23 bp, Artificial Sequence
  Description of Artificial Sequence: Synthetic primer
gaagtcggtgccagaaccagatc

SEQ ID NO: 675 - DNA, 39 bp, Artificial Sequence
  Description of Artificial Sequence: Synthetic primer
tctctggaaccagaagacttcgccgtgtactactgccag

SEQ ID NO: 676 - DNA, 34 bp, Artificial Sequence
  Description of Artificial Sequence: Synthetic primer
acgtttgatctccactttggtaccaccaccgaaa

SEQ ID NO: 677 - protein, 120 aa, Artificial Sequence
  Description of Artificial Sequence: Synthetic polypeptide
EVQLLESGGGLVQPGGSLRLSCKASGYTFSSYGMYWVRQAPGKGLEWIGWIDPGSGGTKYNEKFKGKATISRDNSKNTLYLQMNSLRAEDTAVYYCARERYGYYFDYWGQGTLVTVSSAS

SEQ ID NO: 678 - protein, 108 aa, Artificial Sequence
  Description of Artificial Sequence: Synthetic polypeptide
EIVLTQSPATLSLSPGERATITCRASQYVGSYLNWYQQKPGQAPRLLIYDASNRATGIPARFSGSGSGTDFTLTISSLEPEDFAVYYCQVWDSSPPVVFGGGTKVEIK

SEQ ID NO: 679 - protein, 120 aa, Artificial Sequence
  Description of Artificial Sequence: Synthetic polypeptide
QVQLLESGGGLVQPGGSLRLSCKASGYTFSSYSIYWVRQAPGKGLEWIGWIDPGNGGTRYNQKFQSKATISRDNSKNTLYLQMNSLRAEDTAVYYCARARVGYSLDYWGQGTLVTVSSAS

SEQ ID NO: 680 - protein, 120 aa, Artificial Sequence
  Description of Artificial Sequence: Synthetic polypeptide
QVQLLESGGGLVQPGGSLRLSCKASGYTFSRQGFTWVRQAPGKGLEWIGWIDPGNGGTRYNEKFKGKATISRDNSKNTLYLQMNSLRAEDTAVYYCARYRVGYSLDYWGQGTLVTVSSAS

SEQ ID NO: 681 - protein, 120 aa, Artificial Sequence
  Description of Artificial Sequence: Synthetic polypeptide
QVQLLESGGGLVQPGGSLRLSCKASGYTFSSYSFSWVRQAPGKGLEWIGYIDPGSGGTKYNQKFQGKATISRDNSKNTLYLQMNSLRAEDTAVYYCARQRVGYSLDYWGQGTLVTVSSAS

SEQ ID NO: 682 - protein, 120 aa, Artificial Sequence
  Description of Artificial Sequence: Synthetic polypeptide
QVQLLESGGGLVQPGGSLRLSCKASGYTFSRYGINWVRQAPGKGLEWIGRIDPGNGGTRYNEKFKGKATISRDNSKNTLYLQMNSLRAEDTAVYYCARANDGYSFDYWGQGTLVTVSSAS

SEQ ID NO: 683 - protein, 120 aa, Artificial Sequence
  Description of Artificial Sequence: Synthetic polypeptide
QVQLLESGGGLVQPGGSLRLSCKASGYTFSRYGISWVRQAPGKGLEQIGWIDPGSGGTRYNQKFKSKATISRDNSKNTLYLQMNSLRAEDTAVYYCARARVGYSFDYWGQGTLVTVSSAS

SEQ ID NO: 684 - protein, 120 aa, Artificial Sequence
  Description of Artificial Sequence: Synthetic polypeptide
QVQLLESGGGLVQPGGSLRLSCKASGYTFSSYTNYWVRQAPGKGLEWIGYIDPGSGGTRYNQKFQGKATISRDNSKNTLYLQMNSLRAEDTAVYYCARSRVGYSFDYWGQGTLVTVSSAS

SEQ ID NO: 685 - protein, 120 aa, Artificial Sequence
  Description of Artificial Sequence: Synthetic polypeptide
QVQLLESGGGLVQPGGSLRLSCKASGYTFSRYSYYWVRQAPGKGLEWIGYIDPGSGGTKYNQKFQSKATISRDNSKNTLYLQMNSLRAEDTAVYYCARARVGYSFDYWGQGTLVTVSSAS

SEQ ID NO: 686 - protein, 120 aa, Artificial Sequence
  Description of Artificial Sequence: Synthetic polypeptide
QVQLLESGGGLVQPGGSLRLSCKASGYTFSSYANTWVRQAPGKGLEWIGWIDPGNGGTSYNQKFKSKATISRDNSKNTLYLQMNSLRAEDTAVYYCARYRSGYSLDYWGQGTLVTVSSAS

SEQ ID NO: 687 - protein, 120 aa, Artificial Sequence
  Description of Artificial Sequence: Synthetic polypeptide
QVQLLESGGGLVQPGGSLRLSCKASGYTFSSYGYYWVRQAPGKGLEWIGWIDPGSGGTRYNQKFKGKATISRDNSKNTLYLQMNSLRAEDTAVYYCARERVGYSLDYWGQGTLVTVSSAS

SEQ ID NO: 688 - protein, 120 aa, Artificial Sequence
  Description of Artificial Sequence: Synthetic polypeptide
QVQLLESGGGLVQPGGSLRLSCKASGYTFSRYAINWVRQAPGKGLEWIGWIDPGSGGTRYNEKFKGQATISRDNSKNTLYLQMNSLRAEDTAVYYCARHRVGYSLDFWGQGTLVTVSSAS

SEQ ID NO: 689 - protein, 120 aa, Artificial Sequence
  Description of Artificial Sequence: Synthetic polypeptide
QVQLLESGGGLVQPGGSLRLSCKASGYTFSRYGIYWVRQAPGKGLEWIGYIDPGSGGTRYNEKFKGKATISRDNSKNTLYLQMNSLRAEDTAVYYCARYHYGYSFDYWGQGTLVTVSSAS

SEQ ID NO: 690 - protein, 120 aa, Artificial Sequence
  Description of Artificial Sequence: Synthetic polypeptide
QVQLLESGGGLVQPGGSLRLSCKASGYTFSRYGYYWVRQVPGKGLEWIGYIDPGNGGTSYNEKFKGKATISRDNSKNTLYLQMNSLRAEDTAVYYCARYHDGYSFDYWGQGTLVTVSSAS

SEQ ID NO: 691 - protein, 120 aa, Artificial Sequence
  Description of Artificial Sequence: Synthetic polypeptide
QVQLLESGGGLVQPGGSLRLSCKASGYTFSRYAYNWVRQAPGKGLEWIGWIDPGSGGTRYNQKFKGKATISRDNSKNTLYLQMNSLRAEDTAVYYCARERFAYYLDYWGQGTLVTVSSAS

SEQ ID NO: 692 - protein, 120 aa, Artificial Sequence
  Description of Artificial Sequence: Synthetic polypeptide
QVQLLESGGGLVQPGGSLRLSCKASGYTFSRYGFSWVRQAPGKGLEWIGRIDPGSGGTRYNQQFQGKATISRDNSKNTLYLQMNSLRAEDTAVYYCARSRDGYYFDYWGQGTLVTVSSAS

SEQ ID NO: 693 - protein, 120 aa, Artificial Sequence
  Description of Artificial Sequence: Synthetic polypeptide
QVQLLESGGGLVQPGGSLRLSCKASGYTFSRYAFNWVRQAPGKGLEWIGYIDPGSGGTRYNEKFQGKATISRDNSKNTLYLQMNSLRAEDTAVYYCARARDGYSFDYWGQGTLVTVSSAS

SEQ ID NO: 694 - protein, 120 aa, Artificial Sequence
  Description of Artificial Sequence: Synthetic polypeptide
QVQLLESGGGLVQPGGSLRLSCKASGYTFSSYGIYWVRQAPGKGLEWIGWIDPGSGGTRYNEKFQSKATISRDNSKNTLYLQMNSLRAEDTAVYYCARERAGYYLDYWGQGTLVTVSSAS

SEQ ID NO: 695 - protein, 120 aa, Artificial Sequence
  Description of Artificial Sequence: Synthetic polypeptide
QVQLLESGGGLVQPGGSLRLSCKASGYTFSRYTITWVRQAPGKGLEWIGYIDPGSGGTKYNEKFQGKATISRDNSKNTLYLQMNSLRAEDTAVYYCARHRVGYYFDYWGQGTLVTVSSAS

SEQ ID NO: 696 - protein, 120 aa, Artificial Sequence
  Description of Artificial Sequence: Synthetic polypeptide
QVQLLESGGGLVQPGGSLRLSCKASGYTFSRYSFIWVRQAPGKGLEWIGYIDPGSGGTKYNQKFKGKATISRDNSKNTLYLQMNSLRTEDTAVYYCARYRSGYSLDYWGQGTLVTVSSAS

SEQ ID NO: 697 - protein, 120 aa, Artificial Sequence
  Description of Artificial Sequence: Synthetic polypeptide
QVQLLESGGGLVQPGGSLRLSCKASGYTFSRYTFYWVRQAPGKGLEWIGYIDPGSGGTRYNQKFKGKATISRDNSKNTLYLQMNSLRAEDTAVYYCARARVGYSFDYWGQGTLVTVSSAS

SEQ ID NO: 698 - protein, 120 aa, Artificial Sequence
  Description of Artificial Sequence: Synthetic polypeptide
QVQLLESGGGLVQPGGSLRLSCKASGQTFSSYGFNWVRQAPGKGLEWIGWIDPGSGGTRYNQKFKSKATISRDNSKNTLYLQMNSLRAEDTAVYYCARANVGYSFDYWGQGTLVTVSSAS

SEQ ID NO: 699 - protein, 120 aa, Artificial Sequence
  Description of Artificial Sequence: Synthetic polypeptide
  MOD_RES (103)..(103): Any amino acid
QVQLLESGGGLVQPGGSLRLSCKASGYTFSRYGYYWVRQAPGKGLEWIGRIDPGSGGTSYNEKFQSKATISRDNSKNTLYLQMNSLRAEDTAVYYCARARVGXSFDYWGQGTLVTVSSAS

SEQ ID NO: 700 - protein, 120 aa, Artificial Sequence
  Description of Artificial Sequence: Synthetic polypeptide
QVQLLESGGGLVQPGGSLRLSCKASGYTFSRYGIYWVRQAPGKGLEWIGRIDPGNGGTRYNQKFQSKATISRDNSKNTLYLQMNSLRAEDTAVYYCARSRVGYSFDYWGQGTLVTVSSAS

SEQ ID NO: 701 - protein, 120 aa, Artificial Sequence
  Description of Artificial Sequence: Synthetic polypeptide
QVQLLESGGGLVQPGGSLRLSCKASGYTFSRYANYWVRQAPGKGLEWIGYIDPGSGGTKYNEKFKGKATISRDNSKNTLYLQMNSLRAEDTAVYYCARSHVGYYFDYWGQGTLVTVSSAS

SEQ ID NO: 702 - protein, 120 aa, Artificial Sequence
  Description of Artificial Sequence: Synthetic polypeptide
QVQLLESGGGLVQPGGSLRLSCKASGYTFSRYSNSWVRQAPGKGLEWIGWIDPGNGGTRYNQKFQSKATISRDNSKNTLYLQMNSLRAEDTAVYYCARARVGYSFDYWGQGTLVTVSSAS

SEQ ID NO: 703 - protein, 120 aa, Artificial Sequence
  Description of Artificial Sequence: Synthetic polypeptide
QVQLLESGGGLVQPGGSLRLSCKASGYTFSSYSITWVRQAPGKGLEWIGWIDPGSGGTRYNEKFKSKATISRDNSKNTLYLQMNSLRAEDTAVYYCARHRVGYSLDYWGQGTLVTVSSAS

SEQ ID NO: 704 - protein, 120 aa, Artificial Sequence
  Description of Artificial Sequence: Synthetic polypeptide
QVQLLESGGGLVQPGGSLRLSCKASGYTFSRYGFSWVRQAPGKGLEWIGWIDPGNGGTRYNQQFKGKATISRDNSKNTLYLQMNSLRAEDTAVYYCARSRVGYSLDYWGQGTLVTVSSAS

SEQ ID NO: 705 - protein, 120 aa, Artificial Sequence
  Description of Artificial Sequence: Synthetic polypeptide
QVQLLESGGGLVQPGGSLRLSCKASGYTFSSYTYTWVRQAPGKGLEWIGWIDPGSGGTRYNEKFEGKATISRDNSKNTLYLQMNSLRAEDTAVYYCARSRVGYSLDYWGQGTLVTVSSAS

SEQ ID NO: 706 - protein, 120 aa, Artificial Sequence
  Description of Artificial Sequence: Synthetic polypeptide
QVQLLESGGGLVQPGGSLRLSCKASGYTFSSYSYYWVRQAPGKGLEWIGRIDPGSGGTRYNQKFQGKATISRDNSKNTLYLQMNSLRAEDTAVYYCARYRDGYSFDYWGQGTLVTVSSAS

SEQ ID NO: 707 - protein, 120 aa, Artificial Sequence
  Description of Artificial Sequence: Synthetic polypeptide
QVQLLESGGGLVQPGGSLRLSCKASGYTFSSYGYSWVRQAPGKGLEWIGRIDPGSGGTKYNEKFKGKATISRDNSKNTLYLQMNSLRAEDTAVYYCARDRVGYSLDYWGQGTLVTVSSAS

SEQ ID NO: 708 - protein, 120 aa, Artificial Sequence
  Description of Artificial Sequence: Synthetic polypeptide
QVQLLESGGGLVQPGGSLRLSCKASGYTFSRYTFSWVRQAPGKGLEWIGYIDPGNGGTRYNEQFKGKATISRDNSKNTLYLQMNSLRAEDTAVYYCARQRVGYNLDYWGQGTLVTVSSAS

SEQ ID NO: 709 - protein, 120 aa, Artificial Sequence
  Description of Artificial Sequence: Synthetic polypeptide
QVQLLESGGGLVQPGGSLRLSCKASGYTFSSYGFSWVRQAPGKGLEWIGWIDPGNGGTRYNEQFQGKATISRDNSKNTLYLQMNSLRAEDTAVYYCARQRVGYSLDYWGEGTLVTVSSAS

SEQ ID NO: 710 - protein, 120 aa, Artificial Sequence
  Description of Artificial Sequence: Synthetic polypeptide
QVQLLESGGGLVQPGGSLRLSCKASGYTFSRYSNSWVRQAPGKGLEWIGWIDPGNGGTRYNEQFQGKATISRDNSKNTLYLQMNSLRAEDTAVYYCARQRVGYSLDYWGQGTLVTVSSAS

SEQ ID NO: 711 - protein, 120 aa, Artificial Sequence
  Description of Artificial Sequence: Synthetic polypeptide
QVQLLESGGGLVQPGGSLRLSCKASGYTFSSYGQSWVRQAPGKGLEWIGRIDPGSGGTRYNEKFQGKATISRDNSKNTLYLQMNSLRAEDTAVYYCARSRDGYSLDYWGQGTLVTVSSAS

SEQ ID NO: 712 - protein, 120 aa, Artificial Sequence
  Description of Artificial Sequence: Synthetic polypeptide
QVQLLESGGGLVQPGGSLRLSCKASGYTFSSYAISWVRQAPGKGLEWIGRIDPGSGGTRYNEKFQSKATISRDNSKNTLYLQMNSLRAEDTAVYYCARSRDGYSLDYWGQGTLVTVSSAS

SEQ ID NO: 713 - protein, 120 aa, Artificial Sequence
  Description of Artificial Sequence: Synthetic polypeptide
QVQLLESGGGLVQPGGSLRLSCKASGYTFSRYSYYWVRQAPGKGLEWIGYIDPGSGGTKYNQKFKGKATISRDNSKNTLYLQMNSLRAEDTAVYYCARYRDGYSFDYWGQGTLVTVSSAS

SEQ ID NO: 714 - protein, 120 aa, Artificial Sequence
  Description of Artificial Sequence: Synthetic polypeptide
QVQLLESGGGLVQPGGSLRLSCKASGYTFSSYTYNWVRQAPGKGLEWIGYIDPGNGGTNYNQKFQSKATISRDNSKNTLYLQMNSLRAEDTAVYYCARSRVGYSLDYWGQGTLVTVSSAS

SEQ ID NO: 715 - protein, 120 aa, Artificial Sequence
  Description of Artificial Sequence: Synthetic polypeptide
QVQLLESGGGLVQPGGSLRLSCKASGYTFSSYTISWVRQAPGKGLEWIGYIDPGNGGTRYNQQFQGKATISRDNSKNTLYLQMNSLRVEDTAVYYCARSRVGYSFDYWGQGTLVTVSSAS

SEQ ID NO: 716 - protein, 120 aa, Artificial Sequence
  Description of Artificial Sequence: Synthetic polypeptide
QVQLLESGGGLLQPGGSLRLSCKASGYTFSRYTFNWVRQAPGKGLEWIGWIDPGSGGTRYNQKFQSKATISRDNSKNTLYLQMNSLRAEDTAVYYCARARVGYSFDYWGQGTLVTVSSAS

SEQ ID NO: 717 - protein, 119 aa, Artificial Sequence
  Description of Artificial Sequence: Synthetic polypeptide
QVQLLESGGGLVQPGGSLRLSCKGQRLPPRYGYYWVRQAPGKGLEWIGYIDPGNGGTRYNEKFQSKATISRDNSKNTLYLQMNSLRAEDTAVYYCARYRSGYYLDYWGQGTLVTVSSAS

SEQ ID NO: 718 - protein, 120 aa, Artificial Sequence
  Description of Artificial Sequence: Synthetic polypeptide
QVQLLESGGGLVQPGGSLRLSCKASGYTYSRYTFSWVRQAPGKGLEWIGYIDPGSGGTKYNQKFKGKATISRDNSKNTLYLQMNSLRAEDTAVYYCARARVGYSFDYWGQGTLVTVSSAS

SEQ ID NO: 719 - protein, 120 aa, Artificial Sequence
  Description of Artificial Sequence: Synthetic polypeptide
QVQLLESGGGLVQPGGSLRLSCKASGYTFSSYGYYWVRQAPGKGLEWIGYIDPGSGGTRYNQKFKSKATISRDNSKNTLYLQMNSLRAEDTAVYYCARYRVGYSFDYWGQGTLVTVSSAS

SEQ ID NO: 720 - protein, 120 aa, Artificial Sequence
  Description of Artificial Sequence: Synthetic polypeptide
QVQLLESGGGLVQPGGSLRLSCKASGYTFSRYGFSWVRQAPGKGLEWIGRIDPGSGGTRYNEKFQSKATISWDNSKNTLYLQMNSLRAEDTAVYYCARSRDGYSFDYWGQGTLVTVSSAS

SEQ ID NO: 721 - protein, 120 aa, Artificial Sequence
  Description of Artificial Sequence: Synthetic polypeptide
QVQLLESGGGLVQPGGSLRLSCKASDYTFSSYGNNWVRQAPGKGLEWIGRIDPGNGGTRYNEKFQGKATISRDNSKNTLYLQMNSLRAEDTAVYYCARARDGYSLDYWGQGTLVTVSSAS

SEQ ID NO: 722 - protein, 120 aa, Artificial Sequence
  Description of Artificial Sequence: Synthetic polypeptide
QVQLLESGGGLVQPGGSLRLSCKASGYTFSSYGISWVRQAPGKGLEWIGWIDPGNGGTKYNQKFQSKATISRDNSKNTLYLQMNSLRAEDTAVYYCARSRVGYSLDYWGQGTLVTVSSAS

SEQ ID NO: 723 - protein, 120 aa, Artificial Sequence
  Description of Artificial Sequence: Synthetic polypeptide
QVQLLESGGGLVQPGGSLRLSCKASGYTFSSYTINWVRQAPGKGLEWIGWIDPGSGGTRYNEKFQGKATISRDNSKNTLYLQMNSLRAEDTAVYYCARHRVGYSFDYWGQGTLVTVSSAS

SEQ ID NO: 724 - protein, 120 aa, Artificial Sequence
  Description of Artificial Sequence: Synthetic polypeptide
QVQLLESGGGLVQPGGSLRLSCKASGYTFSRYGISWVRQAPGKGLEWIGRIDPGSGGTRYNEKFQSKATISRDNSKNTLYLQMNSLRAQDTAVYYCARANDGYSFDYWGQGTLVTVSSAS

SEQ ID NO: 725 - protein, 120 aa, Artificial Sequence
  Description of Artificial Sequence: Synthetic polypeptide
QVQLLESGGGLVQPGGSLRLSCKASGYTFSRYGINWVRQAPGKGLEWIGRIDPGNGGTRYNEKFKGKATISRDNSKNTLYLQMNSLRAEDTAVYYCARADVGYSFDYWGQGTLVTVSSAS

SEQ ID NO: 726 - protein, 120 aa, Artificial Sequence
  Description of Artificial Sequence: Synthetic polypeptide
EVQLLESGGGLVQPGGSLRLSCKASGYTFSSYGMYWVRQAPGKGLEWIGWIDPGSGGTKYNEKFKGKATISRDNSKNTLYLQMNSLRAEDTAVYYCARGFVYYSFDYWGQGTLVTVSSAS

SEQ ID NO: 727 - protein, 120 aa, Artificial Sequence
  Description of Artificial Sequence: Synthetic polypeptide
EVQLLESGGGLVQPGGSLRLSCKASGYTFSSYGMYWVRQAPGKGLEWIGWIDPGSGGTKYNEKFKGKATISRDNSKNTLYLQMNSLRAEDTAVYYCARGFIYYSFDYWGQGTLVTVSSAS

SEQ ID NO: 728 - protein, 120 aa, Artificial Sequence
  Description of Artificial Sequence: Synthetic polypeptide
EVQLLESGGGLVQPGGSLRLSCKASGYTFSSYGMYWVRQAPGKGLEWIGWIDPGSGGTKYNEKFKGKATISRDNSKNTLYLQMNSLRAEDTAVYYCARGFLYYSFDYWGQGTLVTVSSAS

SEQ ID NO: 729 - protein, 120 aa, Artificial Sequence
  Description of Artificial Sequence: Synthetic polypeptide
EVQLLESGGGLVQPGGSLRLSCKASGYTFSSYGMYWVRQAPGKGLEWIGWIDPGSGGTKYNEKFKGKATISRDNSKNTLYLQMNSLRAEDTAVYYCARGRIYYSFDYWGQGTLVTVSSAS

SEQ ID NO: 730 - protein, 120 aa, Artificial Sequence
  Description of Artificial Sequence: Synthetic polypeptide
EVQLLESGGGLVQPGGSLRLSCKASGYTFSSYGMYWVRQAPGKGLEWIGWIDPGSGGTKYNEKFKGKATISRDNSKNTLYLQMNSLRAEDTAVYYCARGRFYYSFDYWGQGTLVTVSSAS

SEQ ID NO: 731 - protein, 120 aa, Artificial Sequence
  Description of Artificial Sequence: Synthetic polypeptide
EVQLLESGGGLVQPGGSLRLSCKASGYTFSSYGMYWVRQAPGKGLEWIGWIDPGSGGTKYNEKFKGKATISRDNSKNTLYLQMNSLRAEDTAVYYCARGRLYYSLDYWGQGTLVTVSSAS

SEQ ID NO: 732 - protein, 120 aa, Artificial Sequence
  Description of Artificial Sequence: Synthetic polypeptide
EVQLLESGGGLVQPGGSLRLSCKASGYTFSSYGMYWVRQAPGKGLEWIGWIDPGSGGTKYNEKFKGKATISRDNSKNTLYLQMNSLRAEDTAVYYCARGFIYYDFDYWGQGTLVTVSSAS

SEQ ID NO: 733 - protein, 120 aa, Artificial Sequence
  Description of Artificial Sequence: Synthetic polypeptide
EVQLLESGGGLVQPGGSLRLSCKASGYTFSSYGMYWVRQAPGKGLEWIGWIDPGSGGTKYNEKFKGKATISRDNSKNTLYLQMNSLRAEDTAVYYCARGKIYYSFDYWGQGTLVTVSSAS

SEQ ID NO: 734 - protein, 120 aa, Artificial Sequence
  Description of Artificial Sequence: Synthetic polypeptide
EVQLLESGGGLVQPGGSLRLSCKASGYTFSSYGMYWVRQAPGKGLEWIGWIDPGSGGTKYNEKFKGKATISRDNSKNTLYLQMNSLRAEDTAVYYCARGYLYYSFDYWGQGTLVTVSSAS

SEQ ID NO: 735 - protein, 120 aa, Artificial Sequence
  Description of Artificial Sequence: Synthetic polypeptide
EVQLLESGGGLVQPGGSLRLSCKASGYTFSSYGMYWVRQAPGKGLEWIGWIDPGSGGTKYNEKFKGKATISRDNSKNTLYLQMNSLRAEDTAVYYCARGFIYYSLDYWGQGTLVTVSSAS

SEQ ID NO: 736 - protein, 120 aa, Artificial Sequence
  Description of Artificial Sequence: Synthetic polypeptide
EVQLLESGGGLVQPGGSLRLSCKASGYTFSSYGMYWVRQAPGKGLEWIGWIDPGSGGTKYNEKFKGKATISRDNSKNTLYLQMNSLRAEDTAVYYCARGNLYYSLDYWGQGTLVTVSSAS

SEQ ID NO: 737 - protein, 120 aa, Artificial Sequence
  Description of Artificial Sequence: Synthetic polypeptide
EVQLLESGGGLVQPGGSLRLSCKASGYTFSSYGMYWVRQAPGKGLEWIGWIDPGSGGTKYNEKFKGKATISRDNSKNTLYLQMNSLRAEDTAVYYCSRGKVGYSLDYWGQGTLVTVSSAS

SEQ ID NO: 738 - protein, 120 aa, Artificial Sequence
  Description of Artificial Sequence: Synthetic polypeptide
EVQLLESGGGLVQPGGSLRLSCKASGYTFSSYGMYWVRQAPGKGLEWIGWIDPGSGGTKYNEKFKGKATISRDNSKNTLYLQMNSLRAEDTAVYYCARGSIGYNLDYWGQGTLVTVSSAS

SEQ ID NO: 739 - protein, 120 aa, Artificial Sequence
  Description of Artificial Sequence: Synthetic polypeptide
EVQLLESGGGLVQPGGSLRLSCKASGYTFSSYGMYWVRQAPGKGLEWIGWIDPGSGGTKYNEKFKGKATISRDNSKNTLYLQMNSLRAEDTAVYYCARGRDGYSLDYWGQGTLVTVSSAS

SEQ ID NO: 740 - protein, 120 aa, Artificial Sequence
  Description of Artificial Sequence: Synthetic polypeptide
EVQLLESGGGLVQPGGSLRLSCKASGFTFSAYGMYWVRQAPGKGLEWIGRIDPSNGGTKYNQKFKGKATISRDNSKNTLYLQMNSLRAEDAAVYYCARERYGYYFDYWGQGTLVTVSSAS

SEQ ID NO: 741 - protein, 120 aa, Artificial Sequence
  Description of Artificial Sequence: Synthetic polypeptide
EVQLLESGGGLVQPGGSLRLSCKASGFTFSDYGMYWVRQAPGKGLEWIGRINPNSGGTKYNEKFKGKATISRDNSKNTLYLQMNSLRAEDTAVYYCARERYGYYFDYWGQGTLVTVSSAS

SEQ ID NO: 742 - protein, 120 aa, Artificial Sequence
  Description of Artificial Sequence: Synthetic polypeptide
EVQLLESGGGLVQPGGSLRLSCKASGFTFSSYQMSWVRQAPGKGLEWIGRIDPGSGGTKYNQKFKGKATISRDNSKNTLYLQMNSLRAEDTAVYYCARERYGYYFDYWGQGTLVTVSSAS

SEQ ID NO: 743 - protein, 120 aa, Artificial Sequence
  Description of Artificial Sequence: Synthetic polypeptide
EVQLLESGGGLVQPGGSLRLSCKASGFTFSYYYMYWVRQAPGKGLEWVGRISPSGGSTYYADSVKGRFTISRDNSKNTLYLQMNSLRAEDTAVYYCARERYGYYFDYWGQGTLVTVSSAS

SEQ ID NO: 744 - protein, 120 aa, Artificial Sequence
  Description of Artificial Sequence: Synthetic polypeptide
EVQLLESGGGLVQPGGSLRLSCKASGFTFTAYGMYWVRQAPGKGLEWIGRIDPGSGGTKYNQKFKGKATISRDNSKNTLYLQMNSLRAEDTAVYYCARERYGYYFDYWGQGTLVTVSSAS

SEQ ID NO: 745 - protein, 120 aa, Artificial Sequence
  Description of Artificial Sequence: Synthetic polypeptide
EVQLLESGGGLVQPGGSLRLSCKASGFTFTSYQMSWVRQAPGKGLEWIGRINPGSGGTKYDEKFKGRATISRDNSKNTLYLQMNSLRAEDTAVYYCARERYGYYFDYWGQGTLVTVSSAS

SEQ ID NO: 746 - protein, 120 aa, Artificial Sequence
  Description of Artificial Sequence: Synthetic polypeptide
EVQLLESGGGLVQPGGSLRLSCKASGFTFTSYWMSWVRQAPGKGLEWIGRINPGSGGTKYDEKFKGRATISRDNSKNTLYLQMNSLRAEDTAVYYCARERYGYYFDYWGQGTLVTVSSAS

SEQ ID NO: 747 - protein, 120 aa, Artificial Sequence
  Description of Artificial Sequence: Synthetic polypeptide
EVQLLESGGGLVQPGGSLRLSCKASGLTFTDYGMYWVRQAPGKGLEWIGWINPDSGSTKYAEKFKGRATISRDNSKNTLYLQMNSLRAEDTAVYYCARERYGYYFDYWGQGTLVTVSSAS

SEQ ID NO: 748 - protein, 120 aa, Artificial Sequence
  Description of Artificial Sequence: Synthetic polypeptide
EVQLLESGGGLVQPGGSLRLSCKASGYTFSYYGMYWVRQAPGKGLEWIGRIDPGSGGTKYNEKFKGKATISRDNSKNTLYLQMNSLRAEDTAVYYCARERYGYYFDYWGQGTLVTVSSAS

SEQ ID NO: 749 - protein, 120 aa, Artificial Sequence
  Description of Artificial Sequence: Synthetic polypeptide
EVQLLESGGGLVQPGGSLRLSCKASGYTFTDYGMYWVRQAPGKGLEWIGWIDPGSGGTKYNEKFKGKATISRDNSKNTLYLQMNSLRAEDTAVYYCARERYGYYFDYWGQGTLVTVSSAS

SEQ ID NO: 750 - protein, 120 aa, Artificial Sequence
  Description of Artificial Sequence: Synthetic polypeptide
EVQLLESGGGLVQPGGSLRLSCKASGYTFTNYGMNWVRQAPGKGLEWIGRIDPSSGGTKYNQKFKGKATISRDNSKNTLYLQMNSLRAEDTAVYYCARERYGYYFDYWGQGTLVTVSSAS

SEQ ID NO: 751 - protein, 120 aa, Artificial Sequence
  Description of Artificial Sequence: Synthetic polypeptide
EVQLLESGGGLVQPGGSLRLSCKASGYTFTSYGMYWVRQAPGKGLEWIGRIDPSSGGTKYNQKFKGKATISRDNSKNTLYLQMNSLRAEDTAVYYCARERYGYYFDYWGQGTLVTVSSAS

SEQ ID NO: 752 - protein, 120 aa, Artificial Sequence
  Description of Artificial Sequence: Synthetic polypeptide
EVQLLESGGGLVQPGGSLRLSCKASGYTFTSYWMSWVRQAPGKGLEWVGRISPGGGTTYYADSVKGRFTISRDNSKNTLYLQMNSLRAEDTAVYYCARERYGYYFDYWGQGTLVTVSSAS

SEQ ID NO: 753 - protein, 120 aa, Artificial Sequence
  Description of Artificial Sequence: Synthetic polypeptide
EVQLLESGGGLVQPGGSLRLSCQASGYTFSSYGMYWVRQAPGKGLEWIGRINPGSGGTNYDEKFKGRATISRDNSKNTLYLQMNSLRAEDTAVYYCARERYGYYFDYWGQGTLVTVSSAS

SEQ ID NO: 754 - protein, 120 aa, Artificial Sequence
  Description of Artificial Sequence: Synthetic polypeptide
EVQLLESGGGLVQPGGSLRLSCEASGFTFSSYGMYWVRQAPGKGLEWIGRINPKQRWHKYNQKFKGKVTISRDNSKNTLYLQMNSLRAEDTAVYYCARERYGYYFDYWGQGTLVTVSSAS

SEQ ID NO: 755 - protein, 120 aa, Artificial Sequence
  Description of Artificial Sequence: Synthetic polypeptide
EVQLLESGGGLVQPGGSLRLSCEASGFSFSNYGMYWVRQAPGKGLEWIGLDRPRQRWHQLNEKFQGRATISRDNSKNTLYLQMNSLRAEDTAVYYCARERYGYYFDYWGQGTLVTVSSAS

SEQ ID NO: 756 - protein, 120 aa, Artificial Sequence
  Description of Artificial Sequence: Synthetic polypeptide
EVQLLESGGGLVQPGGSLRLSCAASGYSFSAYYIHWVRQAPGKGLESIGRIDPGSGGTKYNEKFQGRATISRDNSKNTLYLQMNSLRAEDTAVYYCARERYGYYFDYWGQGTLVTVSSAS

SEQ ID NO: 757 - protein, 121 aa, Artificial Sequence
  Description of Artificial Sequence: Synthetic polypeptide
EVQLLESGGGLVQPGGSLRLSCKASGFSFSSYGIYWVRQAPGKGLEWIGLDRPKQRVGTKYNQKFQGRVTISRDNSKNTLYLQMNSLRAEDTAVYYCARERYGYYFDYWGQGTLVTVSSAS

SEQ ID NO: 758 - protein, 120 aa, Artificial Sequence
  Description of Artificial Sequence: Synthetic polypeptide
EVQLLESGGGLVQPGDSLRLSCAASGYSFSTFGIYWVRQAPGKGLEWIGLDRPRQRWPKYNEKFKGRATISRDNSKNTLYLQMNSLRAEDTAVYYCARERYGYYFDYWGQGTLVTVSSAS

SEQ ID NO: 759 - protein, 120 aa, Artificial Sequence
  Description of Artificial Sequence: Synthetic polypeptide
EVQLLESGGGLVQPGGSLRLSCEASGFTFSDYGIHWVRQAPGKGLEWIGLDRPKQRWHQYNEKFQGRATISRDNSKNTLYLQMNSLRAEDTAVYYCARERYGYYFDYWGQGTLVTVSSAS

SEQ ID NO: 760 - protein, 121 aa, Artificial Sequence
  Description of Artificial Sequence: Synthetic polypeptide
EVQLLESGGGLVQPGGSLRLSCAASGYTFSDFGIYWVRQAPGKGLEWIGSDRPRQRVAPKYNQKFKGRATISRDNSKNTLYLQMNSLRAEDTAVYYCARERYGYYFDYWGQGTLVTVSSAS

SEQ ID NO: 761 - protein, 120 aa, Artificial Sequence
  Description of Artificial Sequence: Synthetic polypeptide
EVQLLESGGGLVQPGGSLRLSCQASGYSFTTYGMYWVRQAPGKGLEWIGRIDPSSGGTKYNQKFQGRVTISRDNSKNTLYLQMNSLRAEDTAVYYCARERYGYYFDYWGQGTLVTVSSAS

SEQ ID NO: 762 - protein, 120 aa, Artificial Sequence
  Description of Artificial Sequence: Synthetic polypeptide
EVQLLESGGGLVQPGGSLRLSCAASGFTFTNYGMYWVRQAPGKGLEWIGLDRPKQRGTKYNQKFQGRATISRDNSKNTLYLQMNSLRAEDTAVYYCARERYGYYFDYWGQGTLVTVSSAS

SEQ ID NO: 763 - protein, 120 aa, Artificial Sequence
  Description of Artificial Sequence: Synthetic polypeptide
EVQLLESGGGLVQPGGSLRLSCKASGYTFSYFGIYWVRQAPGKGLEWIGSDRPRQRWHQVQRKFKGRATISRDNSKNTLYLQMNSLRAEDTAVYYCARERYGYYFDYWGQGTLVTVSSAS

SEQ ID NO: 764 - protein, 120 aa, Artificial Sequence
  Description of Artificial Sequence: Synthetic polypeptide
EVQLLESGGGLVQPGGSLRLSCTASGFTFSNYGMYWVRQAPGKGLEWIGRIDPNSGGTKYNEKFQGRATISRDNSKNTLYLQMNSLRAEDTAVYYCARERYGYYFDYWGQGTLVTVSSAS

SEQ ID NO: 765 - protein, 120 aa, Artificial Sequence
  Description of Artificial Sequence: Synthetic polypeptide
EVQLLESGGGLVQPGGSLRLSCTASGYSFTAFGMYWVRQAPGKGLEWIGRINPSSGGTNYNEQFQGRATISRDNSKNTLYLQMNSLRAEDTAVYYCARERYGYYFDYWGQGTLVTVSSAS

SEQ ID NO: 766 - protein, 120 aa, Artificial Sequence
  Description of Artificial Sequence: Synthetic polypeptide
EVQLLESGGGLVQPGGSLRLSCKASGFTFSSYGMYWVRQAPGKGLEWIGSDRPRQRWHQVQPKVQGRATISRDNSKNTLYLQMNSLRAEDTAVYYCARERYGYYFDYWGQGTLVTVSSAS

SEQ ID NO: 767 - protein, 120 aa, Artificial Sequence
  Description of Artificial Sequence: Synthetic polypeptide
EVQLLESGGGLVQPGGSLRLSCKASGYSFSAYGMYWVRQAPGKGLEWIGRIDPNSGGTKQNEKFQGRATISRDNSKNTLYLQMNSLRAEDTAVYYCARERYGYYFDYWGQGTLVTVSSAS

SEQ ID NO: 768 - protein, 120 aa, Artificial Sequence
  Description of Artificial Sequence: Synthetic polypeptide
EVQLLESGGGLVQPGGSLRLSCEASGYTFTSFQMHWVRQAPGKGLESIGRIDPGSGGTKYNQKFQGRATISRDNSKNTLYLQMNSLRAEDTAVYYCARERYGYYFDYWGQGTLVTVSSAS

SEQ ID NO: 769 - protein, 120 aa, Artificial Sequence
  Description of Artificial Sequence: Synthetic polypeptide
EVQLLESGGGLVQPGGSLRLSCAASGYTFSSFSMYWVRQAPGKGLEWIGLDRPRQRWHQVNEKFQGRATISRDNSKNTLYLQMNSLRAEDTAVYYCARERYGYYFDYWGQGTLVTVSSAS

SEQ ID NO: 770 - protein, 120 aa, Artificial Sequence
  Description of Artificial Sequence: Synthetic polypeptide
EVQLLESGGGLVQPGGSLRLSCQASGYTFTNYGMYWVRQAPGKGLEWIGRIDPGNGGTKYNEKFKGKVTISRDNSKNTLYLQMNSLRAEDTAVYYCARERYGYYFDYWGQGTLVTVSSAS

SEQ ID NO: 771 - protein, 120 aa, Artificial Sequence
  Description of Artificial Sequence: Synthetic polypeptide
EVQLLESGGGLVQPGGSLRLSCQASGYTFTAFGMYWVRQAPGKGLEWIGRIDPGSGGTKYNEKFQGKVTISRDNSKNTLYLQMNSLRAEDTAVYYCARERYGYYFDYWGQGTLVTVSSAS

SEQ ID NO: 772 - protein, 120 aa, Artificial Sequence
  Description of Artificial Sequence: Synthetic polypeptide
EVQLLESGGGLVQPGGSLRLSCKASGFSFTSYGMYWVRQAPGKGLEWIGQDRPKYGGTKYNEKFKGRVTISRDNSKNTLYLQMNSLRAEDTAVYYCARERYGYYFDYWGQGTLVTVSSAS

SEQ ID NO: 773 - protein, 120 aa, Artificial Sequence
  Description of Artificial Sequence: Synthetic polypeptide
EVQLLESGGGLVQPGGSLRLSCQASGFTFSTYGIYWVRQAPGKGLEWIGRINPSNGGTKYNEKFKGRATISRDNSKNTLYLQMNSLRAEDTAVYYCARERYGYYFDYWGQGTLVTVSSAS

SEQ ID NO: 774 - protein, 121 aa, Artificial Sequence
  Description of Artificial Sequence: Synthetic polypeptide
EVQLLESGGGLVQPGGSLRLSCKASGFSFSSYGMYWVRQAPGKGLEWIGSDRPRQRWGTKYNEKFQGRVTISRDNSKNTLYLQMNSLRAEDTAVYYCARERYGYYFDYWGQGTLVTVSSAS

SEQ ID NO: 775 - protein, 120 aa, Artificial Sequence
  Description of Artificial Sequence: Synthetic polypeptide
EVQLLESGGGLVQPGGSLRLSCEASGYSFSNFGMYWVRQAPGKGLEWIGWINPSNGGTKYNEKFKGRATISRDNSKNTLYLQMNSLRAEDTAVYYCARERYGYYFDYWGQGTLVTVSSAS

SEQ ID NO: 776 - protein, 120 aa, Artificial Sequence
  Description of Artificial Sequence: Synthetic polypeptide
EVQLLESGGGLVQPGGSLRLSCTASDFSFSTFSMYWVRQAPGKGLEWIGSDQPRQGGTKYNEKFKGRATISRDNSKNTLYLQMNSLRAEDTAVYYCARERYGYYFDYWGQGTLVTVSSAS

SEQ ID NO: 777 - protein, 120 aa, Artificial Sequence
  Description of Artificial Sequence: Synthetic polypeptide
EVQLLESGGGLVQPGGSLRLSCAASGYTFSDFGIYWVRQAPGKGLEWIGSDRPRQGGTKYNEKFKDRVTISRDNSKNTLYLQMNSLRAEDTAVYYCARERYGYYFDYWGQGTLVTVSSAS

SEQ ID NO: 778 - protein, 120 aa, Artificial Sequence
  Description of Artificial Sequence: Synthetic polypeptide
EVQLLESGGGLVQPGGSLRLSCAASGYSFTSFGIYWVRQAPGKGLEWIGSDRPKQRGTKYNEKFKGKVTISRDNSKNTLYLQMNSLRAEDTAVYYCARERYGYYFDYWGQGTLVTVSSAS

SEQ ID NO: 779 - protein, 120 aa, Artificial Sequence
  Description of Artificial Sequence: Synthetic polypeptide
EVQLLESGGGLVQPGGSLRLSCQASGFSFSDYYMSWVRQAPGKGLESIGRINPGSGGTKYNEKFQGRATISRDNSKNTLYLQMNSLRAEDTAVYYCARERYGYYFDYWGQGTLVTVSSAS

SEQ ID NO: 780 - protein, 120 aa, Artificial Sequence
  Description of Artificial Sequence: Synthetic polypeptide
EVQLLESGGGLVQPGGSLRLSCAASGYSFSDYGIYWVRQAPGKGLEWIGSDRPKQRWHQVNEKFQGKVTISRDNSKNTLYLQMNSLRAEDTAVYYCARERYGYYFDYWGQGTLVTVSSAS

SEQ ID NO: 781 - protein, 120 aa, Artificial Sequence
  Description of Artificial Sequence: Synthetic polypeptide
EVQLLESGGGLVQPGGSLRLSCKASGYSFSTYYMYWVRQAPGKGLEWIGRIDPDSGGTKYNEKFQGRATISRDNSKNTLYLQMNSLRAEDTAVYYCARERYGYYFDYWGQGTLVTVSSAS

SEQ ID NO: 782 - protein, 120 aa, Artificial Sequence
  Description of Artificial Sequence: Synthetic polypeptide
EVQLLESGGGLVQPGGSLRLSCEASGYTFSAFQIYWVRQAPGKGLEWIGRIDPGNGGTKYNEKFKGKATISRDNSKNTLYLQMNSLRAEDTAVYYCARERYGYYFDYWGQGTLVTVSSAS

SEQ ID NO: 783 - protein, 120 aa, Artificial Sequence
  Description of Artificial Sequence: Synthetic polypeptide
EVQLLESGGGLVQPGGSLRLSCQASGFSFSNFYMYWVRQAPGKGLEWIGRIDPGSGGTKYNEKFQGRATISRDNSKNTLYLQMNSLRAEDTAVYYCARERYGYYFDYWGQGTLVTVSSAS

SEQ ID NO: 784 - protein, 120 aa, Artificial Sequence
  Description of Artificial Sequence: Synthetic polypeptide
EVQLLESGGGLVQPGGSLRLSCKASGFTFSAFGIYWVRQAPGKGLEWIGRINPDNGGTKYNEKFQGRVTISRDNSKNTLYLQMNSLRAEDTAVYYCARERYGYYFDYWGQGTLVTVSSAS

SEQ ID NO: 785 - protein, 120 aa, Artificial Sequence
  Description of Artificial Sequence: Synthetic polypeptide
EVQLLESGGGLVQPGGSLRLSCKASGYTFSTYGMYWVRQAPGKGLEWIGRDQPRQGGTNYNEKFQGRATISRDNSKNTLYLQMNSLRAEDTAVYYCARERYGYYFDYWGQGTLVTVSSAS

SEQ ID NO: 786 - protein, 120 aa, Artificial Sequence
  Description of Artificial Sequence: Synthetic polypeptide
EVQLLESGGGLVQPGGSLRLSCAASGYSFSTYGIYWVRQAPGKGLEWIGRINPNNGGTKYNEKFQGKATISRDNSKNTLYLQMNSLRAEDTAVYYCARERYGYYFDYWGQGTLVTVSSAS

SEQ ID NO: 787 - protein, 120 aa, Artificial Sequence
  Description of Artificial Sequence: Synthetic polypeptide
EVQLLESGGGLVQPGGSLRLSCTASGFSFSAYGMYWVRQAPGKGLEWIGSDRPRQGGTKYNEKFKGRVTISRDNSKNTLYLQMNSLRAEDTAVYYCARERYGYYFDYWGQGTLVTVSSAS

SEQ ID NO: 788 - protein, 120 aa, Artificial Sequence
  Description of Artificial Sequence: Synthetic polypeptide
EVQLLESGGGLVQPGGSLRLSCAASGFSFSNYYMYWVRQAPGKGLEWIGRIDPGSGGTKYNEKFQGRATISRDNSKNTLYLQMNSLRAEDTAVYYCARERYGYYFDYWGQGTLVTVSSAS

SEQ ID NO: 789 - protein, 120 aa, Artificial Sequence
  Description of Artificial Sequence: Synthetic polypeptide
EVQLLESGGGLVQPGGSLRLSCEASGYTFTSYGMYWMRQAPGKGLEWIGRIDPGSGGTKYNEKFQGRVTISRDNSKNTLYLQMNSLRAEDTAVYYCARERYGYYFDYWGQGTLVTVSSAS

SEQ ID NO: 790 - protein, 121 aa, Artificial Sequence
  Description of Artificial Sequence: Synthetic polypeptide
EVQLLESGGGLVQPGGSLRLSCAASGFTFTNYGMYWVRQAPGKGLEWIGSDRPKQRWAPKYNEKFKGRATISRDNSKNTLYLQMNSLRAEDTAVYYCARERYGYYFDYWGQGTLVTVSSAS

SEQ ID NO: 791 - protein, 120 aa, Artificial Sequence
  Description of Artificial Sequence: Synthetic polypeptide
EVQLLESGGGLVQPGGSLRLSCKASGYTFSDFAMYWVRQAPGKGLEWIGSDQPRQRWHQVQPKVQGRVTISRDNSKNTLYLQMNSLRAEDTAVYYCARERYGYYFDYWGQGTLVTVSSAS

SEQ ID NO: 792 - protein, 120 aa, Artificial Sequence
  Description of Artificial Sequence: Synthetic polypeptide
EVQLLESGGGLVQPGGSLRLSCKASGYSFTNFGMYWVRQAPGKGLEWIGRINPGNGGTKQNEKFKGRATISRDNSKNTLYLQMNSLRAEDTAVYYCARERYGYYFDYWGQGTLVTVSSAS

SEQ ID NO: 793 - protein, 120 aa, Artificial Sequence
  Description of Artificial Sequence: Synthetic polypeptide
EVQLLESGGGLVQPGGSLRLSCAASGYSFSYYGMYWVRQAPGKGLEWIGRINPSSGGTKYNEKFKGRATISRDNSKNTLYLQMNSLRAEDTAVYYCARERYGYYFDYWGQGTLVTVSSAS

SEQ ID NO: 794 - protein, 120 aa, Artificial Sequence
  Description of Artificial Sequence: Synthetic polypeptide
EVQLLESGGGLVQPGGSLRLSCEASGYSFSAFGIYWVRQAPGKGLEWIGRINPNSGGTKYNEKFKGRVTISRDNSKNTLYLQMNSLRAEDTAVYYCARERYGYYFDYWGQGTLVTVSSAS

SEQ ID NO: 795 - protein, 120 aa, Artificial Sequence
  Description of Artificial Sequence: Synthetic polypeptide
EVQLLESGGGLVQPGGSLRLSCKTSGYTFSAFQIYWVRQAPGKGLEWIGRIDPGSGGTKYNQKFKGRTTISRDNSKNTLYLQMNSLRAEDTAVYYCARERYGYYFDYWGQGTLVTVSSAS

SEQ ID NO: 796 - protein, 120 aa, Artificial Sequence
  Description of Artificial Sequence: Synthetic polypeptide
EVQLLESGGGLVQPGGSLRLSCKASGYTFSSYGMYWVRQAPGKGLEWIGWIDPGSGGTKYQDKFKGKATISRDNSKNTLYLQMNSLRAEDTAVYYCAREKYGYYFDYWGQGTLVTVSSAS

SEQ ID NO: 797 - protein, 120 aa, Artificial Sequence
  Description of Artificial Sequence: Synthetic polypeptide
EVQLLESGGGLVQPGGSLRLSCKASGYTFSSYGMYWVRQAPGKGLEWIGWIDPGSGGTKYQEKFKGKVTISRDNSKNTLYLQMNSLRAEDTAVYYCAREKYGYYFDYWGQGTLVTVSSAS

SEQ ID NO: 798 - protein, 120 aa, Artificial Sequence
  Description of Artificial Sequence: Synthetic polypeptide
EVQLLESGGGLVQPGGSLRLSCKASGYTFSSYGMYWVRQAPGKGLEWIGWIDPGSGGTKYQEKFKGKATISRDNSKNTLYLQMNSLRAEDTAVYYCARYKSGWYFDYWGQGTLVTVSSAS

SEQ ID NO: 799 - protein, 120 aa, Artificial Sequence
  Description of Artificial Sequence: Synthetic polypeptide
EVQLLESGGGLVQPGGSLRLSCKASGYTFSSYGMYWVRQAPGKGLEWIGWIDPGSGGTKYQEKFKGKATISRDNSKNTLYLQMNSLRAEDTALYYCAREKYGYYFDYWGQGMLVTVSSAS

SEQ ID NO: 800 - protein, 120 aa, Artificial Sequence
  Description of Artificial Sequence: Synthetic polypeptide
EVQLLESGGGLVQPGGSLRLSCKASGYTFSSYGMYWVRQAPGKGLEWIGWIDPGSGGTNYQEKFKGKATISRDNSKNTLYLQMNSLRAEDTAVYYCARYRSGYYFDYWGQGTLVTVSSAS

SEQ ID NO: 801 - protein, 120 aa, Artificial Sequence
  Description of Artificial Sequence: Synthetic polypeptide
EVQLLESGGGLVQPGGSLRLSCKASGYTFSSYGMYWVRQAPGKGLEWIGWIDPGSGGTKYQEKFKGKATISRDNSKNTLYLQMNSLRAEDTAVYYCARYRSGYYFDYWGQGTLVTVSSAS

SEQ ID NO: 802 - protein, 120 aa, Artificial Sequence
  Description of Artificial Sequence: Synthetic polypeptide
EVQLLESGGGLVQPGGSLRLSCKASGYTFSSYGMYWVRQAPGKGLEWIGWIDPGSGGTNYQQKFKGKATISRDNSKNTLYLQMNSLRAEDTAVYYCARYKSGYYFDYWGQGTLVTVSSAS

SEQ ID NO: 803 - protein, 120 aa, Artificial Sequence
  Description of Artificial Sequence: Synthetic polypeptide
EVQLLESGGGLVQPGGSLRLSCKASGYTFSSYGMYWVRQAPGKGLEWIGWIDPGSGGTKYADKFKGKATISRDNSKNTLYLQMNSLRAEDTAVYYCARYRSGYYFDYWGQGTLVTVSSAS

SEQ ID NO: 804 - protein, 120 aa, Artificial Sequence
  Description of Artificial Sequence: Synthetic polypeptide
EVQLLESGGGLVQPGGSLRLSCKASGYTFSSYGMYWVRQAPGKGLEWIGWIDPGSGGTKYEEKFKGKATISRDNSKNTLYLQMNSLRAEDTAVYYCARERYGYYFDYWGQGTLVTVSSAS

SEQ ID NO: 805 - protein, 120 aa, Artificial Sequence
  Description of Artificial Sequence: Synthetic polypeptide
EVQLLESGGGLVQPGGSLRLSCKASGYTFSSYGMYWVRQAPGKGLEWIGWIDPGSGGTKYQDKFKGKATISRDNSKNTLYLQMNSLRAEDTAVYYCAREKSGYYFDYWGQGTLVTVSSAS

SEQ ID NO: 806 - protein, 120 aa, Artificial Sequence
  Description of Artificial Sequence: Synthetic polypeptide
EVQLLESGGGLVQPGGSLRLSCKASGYTFSSYGMYWVRQAPGKGLEWIGWIDPGSGGTKYQEKFKGKATISRDNSKNTLYLQMNSLRAEDTAVYYCAREKYGYYFDYWGQGTLVTVSSAS

SEQ ID NO: 807 - protein, 120 aa, Artificial Sequence
  Description of Artificial Sequence: Synthetic polypeptide
EVQLLESGGGLVQPGGSLRLSCKASGYTFSSYGMYWVRQAPGKGLEWIGWIDPGSGGTKYNDKFKGKATISRDNSKNTLYLQMNSLRAEDTAVYYCARYRSGYYFDYWGQGTLVTVSSAS

SEQ ID NO: 808 - protein, 120 aa, Artificial Sequence
  Description of Artificial Sequence: Synthetic polypeptide
EVQLLESGGGLVQPGGSVRLSCKASGYTFSSYGMYWVRQAPGKGLEWIGWIDPGSGGTKYYEKFKGKATISRDNSKNTLYLQMNSLRAEDTAVYYCARYKSGYYFDYWGQGTLVTVSSAS

SEQ ID NO: 809 - protein, 120 aa, Artificial Sequence
  Description of Artificial Sequence: Synthetic polypeptide
EVQLLESGGGLVQPGGSLRLSCKASGYTFSSYGMYWVRQAPGKGLEWIGWIDPGSGGTKYEEKFKGKATISRDNSKNTLYLQMNSLRAEDTAVYYCARYKSGYYFDYWGQGTLVTVSSAS

SEQ ID NO: 810 - protein, 120 aa, Artificial Sequence
  Description of Artificial Sequence: Synthetic polypeptide
EVQLLESGGGLVQPGGSLRLSCKASGYTFSSYGMYWMRQAPGKGLEWIGWIDPGSGGTKYEDKFEGKATISRDNSKNTLYLQMNSLRAEDTAVYYCARERSGYYFDYWGQGTLVTVSSAS

SEQ ID NO: 811 - protein, 120 aa, Artificial Sequence
  Description of Artificial Sequence: Synthetic polypeptide
EVQLLESGGGLVQPGGSLRLSCKASGYTFSSYGMYWVRQAPGKGLEWIGWIDPGSGGTNYTQKFKGKATISRDNSKNTLYLQMNSLRAEDTAVYYCARYRSGYYFDYWGQGTLVTVSSAS

SEQ ID NO: 812 - protein, 120 aa, Artificial Sequence
  Description of Artificial Sequence: Synthetic polypeptide
EVQLLESGGGLVQPGGSLRLSCKASGYTFSSYGMYWVRQAPGKGLEWIGWIDPGSGGTKYSHKFKGKATISRDNSKNTLYLQMNSLRAEDTAVYYCARERYGYYFDYWGQGTLVTVSSAS

SEQ ID NO: 813 - protein, 108 aa, Artificial Sequence
  Description of Artificial Sequence: Synthetic polypeptide
EIVLTQSPATLSLSPGERATITCRASQYVGTYLNWYQQKPGQAPRLLIYDASNRATGIPARFSGSGSGTDFTLTISSLEPEDFAVYYCQVWDSSPPVAFGGGTKVEIK

SEQ ID NO: 814 - protein, 108 aa, Artificial Sequence; identical to SEQ ID NO: 678
  Description of Artificial Sequence: Synthetic polypeptide

SEQ ID NO: 815 - protein, 108 aa, Artificial Sequence
  Description of Artificial Sequence: Synthetic polypeptide
EIVLTQSPATLSLSPGERATITCRASQYVGTYLNWYQQKPGQAPRLLIYDASNRATGIPARFSGSGSGTDFTLTISSLEPEDFAVYYCQVWDSSPPVVFGGGTKVEIK

SEQ ID NO: 816 - protein, 108 aa, Artificial Sequence
  Description of Artificial Sequence: Synthetic polypeptide
EIVLTQSPATLSLSPGERATITCRASQYVGSYLNWYQQKPGQAPRLLIYDASNRATGIPARFSGSGSGTDFTLTISSLEPEDFAVYYCQVWDSSPPVAFGGGTKVEIK

SEQ ID NO: 817 - protein, 108 aa, Artificial Sequence
  Description of Artificial Sequence: Synthetic polypeptide
EIVLTQSPATLSLSPGERATITCRASQYVGSYLNWYQQKPGQAPRLLIYDASNRATGIPARFSGSGSGTDFTLTISSLEPEDFAVYYCQVWDSSPPLVFGGGTKVEIK

SEQ ID NO: 818 - protein, 108 aa, Artificial Sequence
  Description of Artificial Sequence: Synthetic polypeptide
EIVLTQSPATLSLSPGERATITCRASQYVGSYLNWYQQKPGQAPRLLIYDASNRATGIPARFSGSGSGTDFTLTISSLEPEDFAVYYCQVWDSSPPLAFGGGTKVEIK

SEQ ID NO: 819 - protein, 108 aa, Artificial Sequence
  Description of Artificial Sequence: Synthetic polypeptide
EIVLTQSPATLSLSPGERATITCRASQYIGSYLNWYQQKPGQAPRLLIYDASNRATGIPARFSGSGSGTDFTLTISSLEPEDFAVYYCQAWDSSPPVVFGGGTKVEIK

SEQ ID NO: 820 - protein, 108 aa, Artificial Sequence
  Description of Artificial Sequence: Synthetic polypeptide
EIVLTQSPATLSLSPGERATITCRASQYVGSYLNWYQQKPGQAPRLLIYDASNRATGIPARFSGSGSGTDFTLTISSLEPEDFAVYYCQVWDSSPPVMFGGGTKVEIK

SEQ ID NO: 821 - protein, 106 aa, Artificial Sequence
  Description of Artificial Sequence: Synthetic polypeptide
DIQMTQSPSSLSASVGDRVTITCRASQAISNYLTWYQQKPGKAPKLLIYAASSLQSGVPSRFSGSGSGTDFTLTISSLQPEDFATYYCQGWDSSPTFGGGTKVEIK

SEQ ID NO: 822 - protein, 108 aa, Artificial Sequence
  Description of Artificial Sequence: Synthetic polypeptide
EIVLTQSPATLSLSPGERATITCRASQYVGTYLNWYQQKPGQAPRLLIYDASNRATGIPARFSGSGSGTDFTLTISSLEPEDFAVYYCQVWDSSPPLVFGGGTKVEIK

SEQ ID NO: 823 - protein, 108 aa, Artificial Sequence
  Description of Artificial Sequence: Synthetic polypeptide
EIVLTQSPATLSLSPGERATITCRASQYVGSYLTWYQQKPGQAPRLLIYDASNRATGIPARFSGSGSGTDFTLTISSLEPEDFAVYYCQVWDSSPPVVFGGGTKVEIK

SEQ ID NO: 824 - protein, 108 aa, Artificial Sequence
  Description of Artificial Sequence: Synthetic polypeptide
EIVLTQSPATLSLSPGERATITCRASQYVGTYLNWYQQKPGQAPRLLIYDASNRATGIPARFSGSGSGTDFTLTISSLEPEDFAVYYCQVWDNSPPVVFGGGTKVEIK

SEQ ID NO: 825 - protein, 108 aa, Artificial Sequence
  Description of Artificial Sequence: Synthetic polypeptide
EIVLTQSPATLSLSPGERATITCRASQYVGSYLNWYQQKPGQAPRLLIYDAANRATGIPARFSGSGSGTDFTLTISSLEPEDFAVYYCQVWDSSPPVVFGGGTKVEIK

SEQ ID NO: 826 - protein, 108 aa, Artificial Sequence
  Description of Artificial Sequence: Synthetic polypeptide
EIVLTQSPATLSLSPGERATITCRASQYIGSYLNWYQQKPGQAPRLLIYDASNRATGIPARFSGSGSGTDFTLTISSLEPEDFAVYYCQAWDSSPPVTFGDGTKVEIK

SEQ ID NO: 827 - protein, 106 aa, Artificial Sequence
  Description of Artificial Sequence: Synthetic polypeptide
DIQMTQSPSSLSASVGDRVTITCRASQDVSNYLNWYQQKPGKAPKLLIYAASSLQSGVPSRFSGSGSGTDFTLTISSLQPEDFATYYCQQSGSYLTFGGGTKVEIK

SEQ ID NO: 828 - protein, 108 aa, Artificial Sequence
  Description of Artificial Sequence: Synthetic polypeptide
EIVLTQSPATLSLSPGERATITCQASQYVGSYLSWYQQKPGQAPRLLIYDASNRATGIPARFSGSGSGTDFTLTISSLEPEDFAVYYCQVWDSYHAVVFGGGTKVEIK

SEQ ID NO: 829 - protein, 108 aa, Artificial Sequence
  Description of Artificial Sequence: Synthetic polypeptide
EIVLTQSPATLSLSPGERATITCQASQYVGSYLSWYQQKPGQAPRLLIYDASNRAAGIPARFSGSGSGTDFTLTISSLEPEDFAVYYCQVWGSYHAVMFGGGTKVEIK

SEQ ID NO: 830 - protein, 108 aa, Artificial Sequence
  Description of Artificial Sequence: Synthetic polypeptide
EIVLTQSPATLSLSPGERATITCRASQYVGSYLSWYQQKPGQAPRLLIYDASNRAAGIPARFSGSGSGTDFTLNISSLEPEDFAVYYCQVWGSYHSVMFGGGTKVEIK

SEQ ID NO: 831 - protein, 108 aa, Artificial Sequence
  Description of Artificial Sequence: Synthetic polypeptide
EIVLTQSPATLSLSPGERATITCQASQYVGSYLSWYQQKPGQAPRLLIYDASNRAAGIPARFSGSGSGTDFTLTISSLEPEDFAVYYCQVWDTDHSVVFGGGTKVEIK

SEQ ID NO: 832 - protein, 108 aa, Artificial Sequence
  Description of Artificial Sequence: Synthetic polypeptide
EIVLTQSPATLSLSPGERATITCQASQYVGSYLSWYQQKPGQAPRLLIYDASNRATGIPARFSGSGSGTDFTLTISSLEPEDFAVYYCQVWDTDHAVAFGGGTKVEIK

SEQ ID NO: 833 - protein, 108 aa, Artificial Sequence
  Description of Artificial Sequence: Synthetic polypeptide
EIVLTQSPATLSLSPGERATITCRASQYVGSYLSWYQQKPGQAPRLLIYDASNRASGIPARFSGSGSGTDFTLTISSLEPEDFAVYYCQVWDSSHSVIFGGGTKVEIK

SEQ ID NO: 834 - protein, 108 aa, Artificial Sequence
  Description of Artificial Sequence: Synthetic polypeptide
EIVLTQSPATLSLSPGERATITCRASQYVGSYLSWYQQKPGQAPRLLIYDASNRATGIPARFSGSGSGTDFTLTISSLEPEDFAVYYCQVWDSYPPVVFGGGTKVEIK

SEQ ID NO: 835 - protein, 108 aa, Artificial Sequence
  Description of Artificial Sequence: Synthetic polypeptide
EIVLTQSPATLSLSPGERATITCRASQYVGSYLSWYQQKPGQAPRLLIYDASNRATGIPARFSGSGSGTDFTLTISSLEPEDFAVYYCQVWDSYHAVVFGGGTKVEIK

SEQ ID NO: 836 - protein, 108 aa, Artificial Sequence
  Description of Artificial Sequence: Synthetic polypeptide
EIVLTQSPATLSLSPGERATITCRASQYVGSYLSWYQQKPGQAPRLLIYDASNRASGIPARFSGSGSGTDFTLTISSLEPEDFAVYYCQVWDSDHAVVFGGGTKVEIK

SEQ ID NO: 837 - protein, 108 aa, Artificial Sequence
  Description of Artificial Sequence: Synthetic polypeptide
EIVLTQSPATLSLSPGERATITCRASQYVGSYLNWYQQKPGQAPRLLIYDAANRATGIPARFSGSGSGTDFTLTISSLEPEDFAVYYCQVWGSNHASLFGGGTKVEIK

SEQ ID NO: 838 - protein, 108 aa, Artificial Sequence
  Description of Artificial Sequence: Synthetic polypeptide
EIVLTQSPATLSLSPGERATITCRASQYVGSYLNWYQQKPGQAPRLLIYDAANRATGIPARFSGSGSGTDFTLTISSLEPEDFAVYYCQVWGSTARVAFGGGTKVEIK

SEQ ID NO: 839 - protein, 108 aa, Artificial Sequence
  Description of Artificial Sequence: Synthetic polypeptide
EIVLTQSPATLSLSPGERATITCRASQYVGSYLNWYQQKPGQAPRLLIYDAANRATGIPARFSGSGSGTDFTLTISSLEPEDFAVYYCQVWNSTPPVVFGGGTKVEIK

SEQ ID NO: 840 - protein, 108 aa, Artificial Sequence
  Description of Artificial Sequence: Synthetic polypeptide
EIVLTQSPATLSLSPGERATITCRASQYVGSYLNWYQQKPGQAPRLLIYDAANRATGIPARFSGSGSGTDFTLTISSLEPEDFAVYYCQVWSSSPPVIFGGGTKVEIK

SEQ ID NO: 841 - protein, 108 aa, Artificial Sequence
  Description of Artificial Sequence: Synthetic polypeptide
EIVLTQSPATLSLSPGERATITCRASQYVGSYLNWYQQKPGQAPRLLIYDAANRATGIPARFSGSGSGTDFTLTISSLEPEDFAVYYCQVWSSSPPVVFGGGTKVEIK

SEQ ID NO: 842 - protein, 108 aa, Artificial Sequence
  Description of Artificial Sequence: Synthetic polypeptide
EIVLTQSPATLSLSPGERATITCRASQYVGSYLNWYQQKPGQAPRLLIYDAANRATGIPARFSGSGSGTDFTLTISSLEPEDFAVYYCQVWSSNHAVVFGGGTKVEIK

SEQ ID NO: 843 - protein, 108 aa, Artificial Sequence
  Description of Artificial Sequence: Synthetic polypeptide
EIVLTQSPATLSLSPGERATITCRASQYVGSYLNWYQQKPGQAPRLLIYDAANRATGIPARFSGSGSGTDFTLTISSLEPEDFAVYYCQVWGSNPPVAFGGGTKVEIK

SEQ ID NO: 844 - protein, 108 aa, Artificial Sequence
  Description of Artificial Sequence: Synthetic polypeptide
EIVLTQSPATLSLSPGERATITCRASQYVGSYLNWYQQKPGQAPRLLIYDAANRATGIPARFSGSGSGTDFTLTISSLEPEDFAVYYCQVWDSTPPVVFGGGTKVEIK

SEQ ID NO: 845 - protein, 108 aa, Artificial Sequence
  Description of Artificial Sequence: Synthetic polypeptide
EIVLTQSPATLSLSPGERATITCRASQYVGSYLNWYQQKPGQAPRLLIYDAANRATGIPARFSGSGSGTDFTLTISSLEPEDFAVYYCQVWDSNPPVVFGGGTKVEIK

SEQ ID NO: 846 - protein, 108 aa, Artificial Sequence
  Description of Artificial Sequence: Synthetic polypeptide
EIVLTQSPATLSLSPGERATITCRASQYVGSYLNWYQQKPGQAPRLLIYDAANRATGIPARFSGSGSGTDFTLTISSLEPEDFAVYYCQGYSSNDGVIFGGGTKVEIK

SEQ ID NO: 847 - protein, 108 aa, Artificial Sequence
  Description of Artificial Sequence: Synthetic polypeptide
EIVLTQSPATLSLSPGERATITCRASQYVGSYLNWYQQKPGQAPRLLIYDAANRATGIPARFSGSGSGTDFTLTISSLEPEDFAVYYCQVWGSNHSVVFGGGTKVEIK

SEQ ID NO: 848 - protein, 108 aa, Artificial Sequence
  Description of Artificial Sequence: Synthetic polypeptide
EIVLTQSPATLSLSPGERATITCRASQYVGSYLNWYQQKPGQAPRLLIYDAANRATGIPARFSGSGSGTDFTLTISSLEPEDFAVYYCQVWDSNHSVVFGGGTKVEIK

SEQ ID NO: 849 - protein, 108 aa, Artificial Sequence
  Description of Artificial Sequence: Synthetic polypeptide
EIVLTQSPATLSLSPGERATITCRASQYVGSYLNWYQQKPGQAPRLLIYDASNRAAGIPARFSGSGSGTDFTLTISSLEPEDFAVYYCQVWDSSPPVVFGGGTKVEIK

SEQ ID NO: 850 - protein, 108 aa, Artificial Sequence
  Description of Artificial Sequence: Synthetic polypeptide
EIVLTQSPATLSLSPGERATITCRASQYVGSYLNWYQQKPGQAPRLLIYDASNRATGIPARFSGSGSGTDFTLTISSLEPEDFAVYYCQVWDSSSAVVFGGGTKVEIK

SEQ ID NO: 851 - protein, 108 aa, Artificial Sequence
  Description of Artificial Sequence: Synthetic polypeptide
EIVLTQSPATLSLSPGERATITCRASQYVGSYLNWYQQKPGQAPRLLIYDASNRATGIPARFSGSGSGTDLTLTISSLEPEDFAVYYCQVWDSSPPVVFGGGTKVEIK

SEQ ID NO: 852 - protein, 16 aa, Artificial Sequence
  Description of Artificial Sequence: Synthetic peptide
KASGYTFSSYGMYWVR

SEQ ID NO: 853 - protein, 16 aa, Artificial Sequence
  Description of Artificial Sequence: Synthetic peptide
KASGYTFSSYSIYWVR

SEQ ID NO: 854 - protein, 16 aa, Artificial Sequence
  Description of Artificial Sequence: Synthetic peptide
KASGYTFSRQGFTWVR

SEQ ID NO: 855 - protein, 16 aa, Artificial Sequence
  Description of Artificial Sequence: Synthetic peptide
KASGYTFSSYSFSWVR

SEQ ID NO: 856 - protein, 16 aa, Artificial Sequence
  Description of Artificial Sequence: Synthetic peptide
KASGYTFSRYGINWVR

SEQ ID NO: 857 - protein, 16 aa, Artificial Sequence
  Description of Artificial Sequence: Synthetic peptide
KASGYTFSRYGISWVR

SEQ ID NO: 858 - protein, 16 aa, Artificial Sequence
  Description of Artificial Sequence: Synthetic peptide
KASGYTFSSYTNYWVR

SEQ ID NO: 859 - protein, 16 aa, Artificial Sequence
  Description of Artificial Sequence: Synthetic peptide
KASGYTFSRYSYYWVR

SEQ ID NO: 860 - protein, 16 aa, Artificial Sequence
  Description of Artificial Sequence: Synthetic peptide
KASGYTFSSYANTWVR

SEQ ID NO: 861 - protein, 16 aa, Artificial Sequence
  Description of Artificial Sequence: Synthetic peptide
KASGYTFSSYGYYWVR

SEQ ID NO: 862 - protein, 16 aa, Artificial Sequence
  Description of Artificial Sequence: Synthetic peptide
KASGYTFSRYAINWVR

SEQ ID NO: 863 - protein, 16 aa, Artificial Sequence
  Description of Artificial Sequence: Synthetic peptide
KASGYTFSRYGIYWVR

SEQ ID NO: 864 - protein, 16 aa, Artificial Sequence
  Description of Artificial Sequence: Synthetic peptide
KASGYTFSRYGYYWVR

SEQ ID NO: 865 - protein, 16 aa, Artificial Sequence
  Description of Artificial Sequence: Synthetic peptide
KASGYTFSRYAYNWVR

SEQ ID NO: 866 - protein, 16 aa, Artificial Sequence
  Description of Artificial Sequence: Synthetic peptide
KASGYTFSRYGFSWVR

SEQ ID NO: 867 - protein, 16 aa, Artificial Sequence
  Description of Artificial Sequence: Synthetic peptide
KASGYTFSRYAFNWVR

SEQ ID NO: 868 - protein, 16 aa, Artificial Sequence
  Description of Artificial Sequence: Synthetic peptide
KASGYTFSSYGIYWVR

SEQ ID NO: 869 - protein, 16 aa, Artificial Sequence
  Description of Artificial Sequence: Synthetic peptide
KASGYTFSRYTITWVR

SEQ ID NO: 870 - protein, 16 aa, Artificial Sequence
  Description of Artificial Sequence: Synthetic peptide
KASGYTFSRYSFIWVR

SEQ ID NO: 871 - protein, 16 aa, Artificial Sequence
  Description of Artificial Sequence: Synthetic peptide
KASGYTFSRYTFYWVR

SEQ ID NO: 872 - protein, 16 aa, Artificial Sequence
  Description of Artificial Sequence: Synthetic peptide
KASGQTFSSYGFNWVR

SEQ ID NO: 873 - protein, 16 aa, Artificial Sequence
  Description of Artificial Sequence: Synthetic peptide
KASGYTFSRYANYWVR

SEQ ID NO: 874 - protein, 16 aa, Artificial Sequence
  Description of Artificial Sequence: Synthetic peptide
KASGYTFSRYSNSWVR

SEQ ID NO: 875 - protein, 16 aa, Artificial Sequence
  Description of Artificial Sequence: Synthetic peptide
KASGYTFSSYSITWVR

SEQ ID NO: 876 - protein, 16 aa, Artificial Sequence
  Description of Artificial Sequence: Synthetic peptide
KASGYTFSSYTYTWVR

SEQ ID NO: 877 - protein, 16 aa, Artificial Sequence
  Description of Artificial Sequence: Synthetic peptide
KASGYTFSSYSYYWVR

SEQ ID NO: 878 - protein, 16 aa, Artificial Sequence
  Description of Artificial Sequence: Synthetic peptide
KASGYTFSSYGYSWVR

SEQ ID NO: 879 - protein, 16 aa, Artificial Sequence
  Description of Artificial Sequence: Synthetic peptide
KASGYTFSRYTFSWVR

SEQ ID NO: 880 - protein, 16 aa, Artificial Sequence
  Description of Artificial Sequence: Synthetic peptide
KASGYTFSSYGFSWVR

SEQ ID NO: 881 - protein, 16 aa, Artificial Sequence
  Description of Artificial Sequence: Synthetic peptide
KASGYTFSSYGQSWVR

SEQ ID NO: 882 - protein, 16 aa, Artificial Sequence
  Description of Artificial Sequence: Synthetic peptide
KASGYTFSSYAISWVR

SEQ ID NO: 883 - protein, 16 aa, Artificial Sequence
  Description of Artificial Sequence: Synthetic peptide
KASGYTFSSYTYNWVR

SEQ ID NO: 884 - protein, 16 aa, Artificial Sequence
  Description of Artificial Sequence: Synthetic peptide
KASGYTFSSYTISWVR

SEQ ID NO: 885 - protein, 16 aa, Artificial Sequence
  Description of Artificial Sequence: Synthetic peptide
KASGYTFSRYTFNWVR

SEQ ID NO: 886 - protein, 15 aa, Artificial Sequence
  Description of Artificial Sequence: Synthetic peptide
KGQRLPPRYGYYWVR

SEQ ID NO: 887 - protein, 16 aa, Artificial Sequence
  Description of Artificial Sequence: Synthetic peptide
KASGYTYSRYTFSWVR

SEQ ID NO: 888 - protein, 16 aa, Artificial Sequence
  Description of Artificial Sequence: Synthetic peptide
KASDYTFSSYGNNWVR

SEQ ID NO: 889 - protein, 16 aa, Artificial Sequence
  Description of Artificial Sequence: Synthetic peptide
KASGYTFSSYGISWVR

SEQ ID NO: 890 - protein, 16 aa, Artificial Sequence
  Description of Artificial Sequence: Synthetic peptide
KASGYTFSSYTINWVR

SEQ ID NO: 891 - protein, 16 aa, Artificial Sequence
  Description of Artificial Sequence: Synthetic peptide
KASGFTFSAYGMYWVR

SEQ ID NO: 892 - protein, 16 aa, Artificial Sequence
  Description of Artificial Sequence: Synthetic peptide
KASGFTFSDYGMYWVR

SEQ ID NO: 893 - protein, 16 aa, Artificial Sequence
  Description of Artificial Sequence: Synthetic peptide
KASGFTFSSYQMSWVR

SEQ ID NO: 894 - protein, 16 aa, Artificial Sequence
  Description of Artificial Sequence: Synthetic peptide
KASGFTFSYYYMYWVR

SEQ ID NO: 895 - protein, 16 aa, Artificial Sequence
  Description of Artificial Sequence: Synthetic peptide
KASGFTFTAYGMYWVR

SEQ ID NO: 896 - protein, 16 aa, Artificial Sequence
  Description of Artificial Sequence: Synthetic peptide
KASGFTFTSYQMSWVR

SEQ ID NO: 897 - protein, 16 aa, Artificial Sequence
  Description of Artificial Sequence: Synthetic peptide
KASGFTFTSYWMSWVR

SEQ ID NO: 898 - protein, 16 aa, Artificial Sequence
  Description of Artificial Sequence: Synthetic peptide
KASGLTFTDYGMYWVR

SEQ ID NO: 899 - protein, 16 aa, Artificial Sequence
  Description of Artificial Sequence: Synthetic peptide
KASGYTFSYYGMYWVR

SEQ ID NO: 900 - protein, 16 aa, Artificial Sequence
  Description of Artificial Sequence: Synthetic peptide
KASGYTFTDYGMYWVR

SEQ ID NO: 901 - protein, 16 aa, Artificial Sequence
  Description of Artificial Sequence: Synthetic peptide
KASGYTFTNYGMNWVR

SEQ ID NO: 902 - protein, 16 aa, Artificial Sequence
  Description of Artificial Sequence: Synthetic peptide
KASGYTFTSYGMYWVR

SEQ ID NO: 903 - protein, 16 aa, Artificial Sequence
  Description of Artificial Sequence: Synthetic peptide
KASGYTFTSYWMSWVR

SEQ ID NO: 904 - protein, 16 aa, Artificial Sequence
  Description of Artificial Sequence: Synthetic peptide
QASGYTFSSYGMYWVR

SEQ ID NO: 905 - protein, 16 aa, Artificial Sequence
  Description of Artificial Sequence: Synthetic peptide
EASGFTFSSYGMYWVR

SEQ ID NO: 906 - protein, 16 aa, Artificial Sequence
  Description of Artificial Sequence: Synthetic peptide
EASGFSFSNYGMYWVR

SEQ ID NO: 907 - protein, 16 aa, Artificial Sequence
  Description of Artificial Sequence: Synthetic peptide
AASGYSFSAYYIHWVR

SEQ ID NO: 908 - protein, 16 aa, Artificial Sequence
  Description of Artificial Sequence: Synthetic peptide
KASGFSFSSYGIYWVR

SEQ ID NO: 909 - protein, 16 aa, Artificial Sequence
  Description of Artificial Sequence: Synthetic peptide
AASGYSFSTFGIYWVR

SEQ ID NO: 910 - protein, 16 aa, Artificial Sequence
  Description of Artificial Sequence: Synthetic peptide
EASGFTFSDYGIHWVR

SEQ ID NO: 911 - protein, 16 aa, Artificial Sequence
  Description of Artificial Sequence: Synthetic peptide
AASGYTFSDFGIYWVR

SEQ ID NO: 912 - protein, 16 aa, Artificial Sequence
  Description of Artificial Sequence: Synthetic peptide
QASGYSFTTYGMYWVR

SEQ ID NO: 913 - protein, 16 aa, Artificial Sequence
  Description of Artificial Sequence: Synthetic peptide
AASGFTFTNYGMYWVR

SEQ ID NO: 914 - protein, 16 aa, Artificial Sequence
  Description of Artificial Sequence: Synthetic peptide
KASGYTFSYFGIYWVR

SEQ ID NO: 915 - protein, 16 aa, Artificial Sequence
  Description of Artificial Sequence: Synthetic peptide
TASGFTFSNYGMYWVR

SEQ ID NO: 916 - protein, 16 aa, Artificial Sequence
  Description of Artificial Sequence: Synthetic peptide
TASGYSFTAFGMYWVR

SEQ ID NO: 917 - protein, 16 aa, Artificial Sequence
  Description of Artificial Sequence: Synthetic peptide
KASGFTFSSYGMYWVR

SEQ ID NO: 918 - protein, 16 aa, Artificial Sequence
  Description of Artificial Sequence: Synthetic peptide
KASGYSFSAYGMYWVR

SEQ ID NO: 919 - protein, 16 aa, Artificial Sequence
  Description of Artificial Sequence: Synthetic peptide
EASGYTFTSFQMHWVR

SEQ ID NO: 920 - protein, 16 aa, Artificial Sequence
  Description of Artificial Sequence: Synthetic peptide
AASGYTFSSFSMYWVR

SEQ ID NO: 921 - protein, 16 aa, Artificial Sequence
  Description of Artificial Sequence: Synthetic peptide
QASGYTFTNYGMYWVR

SEQ ID NO: 922 - protein, 16 aa, Artificial Sequence
  Description of Artificial Sequence: Synthetic peptide
QASGYTFTAFGMYWVR

SEQ ID NO: 923 - protein, 16 aa, Artificial Sequence
  Description of Artificial Sequence: Synthetic peptide
KASGFSFTSYGMYWVR

SEQ ID NO: 924 - protein, 16 aa, Artificial Sequence
  Description of Artificial Sequence: Synthetic peptide
QASGFTFSTYGIYWVR

SEQ ID NO: 925 - protein, 16 aa, Artificial Sequence
  Description of Artificial Sequence: Synthetic peptide
KASGFSFSSYGMYWVR

SEQ ID NO: 926 - protein, 16 aa, Artificial Sequence
  Description of Artificial Sequence: Synthetic peptide
EASGYSFSNFGMYWVR

SEQ ID NO: 927 - protein, 16 aa, Artificial Sequence
  Description of Artificial Sequence: Synthetic peptide
TASDFSFSTFSMYWVR

SEQ ID NO: 928 - protein, 16 aa, Artificial Sequence
  Description of Artificial Sequence: Synthetic peptide
AASGYSFTSFGIYWVR

SEQ ID NO: 929 - protein, 16 aa, Artificial Sequence
  Description of Artificial Sequence: Synthetic peptide
QASGFSFSDYYMSWVR

SEQ ID NO: 930 - protein, 16 aa, Artificial Sequence
  Description of Artificial Sequence: Synthetic peptide
AASGYSFSDYGIYWVR

SEQ ID NO: 931 - protein, 16 aa, Artificial Sequence
  Description of Artificial Sequence: Synthetic peptide
KASGYSFSTYYMYWVR

SEQ ID NO: 932 - protein, 16 aa, Artificial Sequence
  Description of Artificial Sequence: Synthetic peptide
EASGYTFSAFQIYWVR

SEQ ID NO: 933 - protein, 16 aa, Artificial Sequence
  Description of Artificial Sequence: Synthetic peptide
QASGFSFSNFYMYWVR

SEQ ID NO: 934 - protein, 16 aa, Artificial Sequence
  Description of Artificial Sequence: Synthetic peptide
KASGFTFSAFGIYWVR

SEQ ID NO: 935 - protein, 16 aa, Artificial Sequence
  Description of Artificial Sequence: Synthetic peptide
KASGYTFSTYGMYWVR

SEQ ID NO: 936 - protein, 16 aa, Artificial Sequence
  Description of Artificial Sequence: Synthetic peptide
AASGYSFSTYGIYWVR

SEQ ID NO: 937 - protein, 16 aa, Artificial Sequence
  Description of Artificial Sequence: Synthetic peptide
TASGFSFSAYGMYWVR

SEQ ID NO: 938 - protein, 16 aa, Artificial Sequence
  Description of Artificial Sequence: Synthetic peptide
AASGFSFSNYYMYWVR

SEQ ID NO: 939 - protein, 16 aa, Artificial Sequence
  Description of Artificial Sequence: Synthetic peptide
EASGYTFTSYGMYWMR

SEQ ID NO: 940 - protein, 16 aa, Artificial Sequence
  Description of Artificial Sequence: Synthetic peptide
KASGYTFSDFAMYWVR

SEQ ID NO: 941 - protein, 16 aa, Artificial Sequence
  Description of Artificial Sequence: Synthetic peptide
KASGYSFTNFGMYWVR

SEQ ID NO: 942 - protein, 16 aa, Artificial Sequence
  Description of Artificial Sequence: Synthetic peptide
AASGYSFSYYGMYWVR

SEQ ID NO: 943 - protein, 16 aa, Artificial Sequence
  Description of Artificial Sequence: Synthetic peptide
EASGYSFSAFGIYWVR

SEQ ID NO: 944 - protein, 16 aa, Artificial Sequence
  Description of Artificial Sequence: Synthetic peptide
KTSGYTFSAFQIYWVR

SEQ ID NO: 945 - protein, 16 aa, Artificial Sequence
  Description of Artificial Sequence: Synthetic peptide
KASGYTFSSYGMYWMR

SEQ ID NO: 946 - protein, 23 aa, Artificial Sequence
  Description of Artificial Sequence: Synthetic peptide
WIGWIDPGSGGTKYNEKFKGKAT

SEQ ID NO: 947 - protein, 23 aa, Artificial Sequence
  Description of Artificial Sequence: Synthetic peptide
WIGWIDPGNGGTRYNQKFQSKAT

SEQ ID NO: 948 - protein, 23 aa, Artificial Sequence
  Description of Artificial Sequence: Synthetic peptide
WIGWIDPGNGGTRYNEKFKGKAT

SEQ ID NO: 949 - protein, 23 aa, Artificial Sequence
  Description of Artificial Sequence: Synthetic peptide
WIGYIDPGSGGTKYNQKFQGKAT

SEQ ID NO: 950 - protein, 23 aa, Artificial Sequence
  Description of Artificial Sequence: Synthetic peptide
WIGRIDPGNGGTRYNEKFKGKAT

SEQ ID NO: 951 - protein, 23 aa, Artificial Sequence
  Description of Artificial Sequence: Synthetic peptide
QIGWIDPGSGGTRYNQKFKSKAT

SEQ ID NO: 952 - protein, 23 aa, Artificial Sequence
  Description of Artificial Sequence: Synthetic peptide
WIGYIDPGSGGTRYNQKFQGKAT

SEQ ID NO: 953 - protein, 23 aa, Artificial Sequence
  Description of Artificial Sequence: Synthetic peptide
WIGYIDPGSGGTKYNQKFQSKAT

SEQ ID NO: 954 - protein, 23 aa, Artificial Sequence
  Description of Artificial Sequence: Synthetic peptide
WIGWIDPGNGGTSYNQKFKSKAT

SEQ ID NO: 955 - protein, 23 aa, Artificial Sequence
  Description of Artificial Sequence: Synthetic peptide
WIGWIDPGSGGTRYNQKFKGKAT

SEQ ID NO: 956 - protein, 23 aa, Artificial Sequence
  Description of Artificial Sequence: Synthetic peptide
WIGWIDPGSGGTRYNEKFKGQAT

SEQ ID NO: 957 - protein, 23 aa, Artificial Sequence
  Description of Artificial Sequence: Synthetic peptide
WIGYIDPGSGGTRYNEKFKGKAT

SEQ ID NO: 958 - protein, 23 aa, Artificial Sequence
  Description of Artificial Sequence: Synthetic peptide
WIGYIDPGNGGTSYNEKFKGKAT

SEQ ID NO: 959 - protein, 23 aa, Artificial Sequence
  Description of Artificial Sequence: Synthetic peptide
WIGRIDPGSGGTRYNQQFQGKAT

SEQ ID NO: 960 - protein, 23 aa, Artificial Sequence
  Description of Artificial Sequence: Synthetic peptide
WIGYIDPGSGGTRYNEKFQGKAT

SEQ ID NO: 961 - protein, 23 aa, Artificial Sequence
  Description of Artificial Sequence: Synthetic peptide
WIGWIDPGSGGTRYNEKFQSKAT

SEQ ID NO: 962 - protein, 23 aa, Artificial Sequence
  Description of Artificial Sequence: Synthetic peptide
WIGYIDPGSGGTKYNEKFQGKAT

SEQ ID NO: 963 - protein, 23 aa, Artificial Sequence
  Description of Artificial Sequence: Synthetic peptide
WIGYIDPGSGGTKYNQKFKGKAT

SEQ ID NO: 964 - protein, 23 aa, Artificial Sequence
  Description of Artificial Sequence: Synthetic peptide
WIGYIDPGSGGTRYNQKFKGKAT

SEQ ID NO: 965 - protein, 23 aa, Artificial Sequence
  Description of Artificial Sequence: Synthetic peptide
WIGWIDPGSGGTRYNQKFKSKAT

SEQ ID NO: 966 - protein, 23 aa, Artificial Sequence
  Description of Artificial Sequence: Synthetic peptide
WIGRIDPGSGGTSYNEKFQSKAT

SEQ ID NO: 967 - protein, 23 aa, Artificial Sequence
  Description of Artificial Sequence: Synthetic peptide
WIGRIDPGNGGTRYNQKFQSKAT

SEQ ID NO: 968 - protein, 23 aa, Artificial Sequence
  Description of Artificial Sequence: Synthetic peptide
WIGYIDPGSGGTKYNEKFKGKAT

SEQ ID NO: 969 - protein, 23 aa, Artificial Sequence
  Description of Artificial Sequence: Synthetic peptide
WIGWIDPGSGGTRYNEKFKSKAT

SEQ ID NO: 970 - protein, 23 aa, Artificial Sequence
  Description of Artificial Sequence: Synthetic peptide
WIGWIDPGNGGTRYNQQFKGKAT

SEQ ID NO: 971 - protein, 23 aa, Artificial Sequence
  Description of Artificial Sequence: Synthetic peptide
WIGWIDPGSGGTRYNEKFEGKAT

SEQ ID NO: 972 - protein, 23 aa, Artificial Sequence
  Description of Artificial Sequence: Synthetic peptide
WIGRIDPGSGGTRYNQKFQGKAT

SEQ ID NO: 973 - protein, 23 aa, Artificial Sequence
  Description of Artificial Sequence: Synthetic peptide
WIGRIDPGSGGTKYNEKFKGKAT

SEQ ID NO: 974 - protein, 23 aa, Artificial Sequence
  Description of Artificial Sequence: Synthetic peptide
WIGYIDPGNGGTRYNEQFKGKAT

SEQ ID NO: 975 - protein, 23 aa, Artificial Sequence
  Description of Artificial Sequence: Synthetic peptide
WIGWIDPGNGGTRYNEQFQGKAT

SEQ ID NO: 976 - protein, 23 aa, Artificial Sequence
  Description of Artificial Sequence: Synthetic peptide
WIGRIDPGSGGTRYNEKFQGKAT

SEQ ID NO: 977 - protein, 23 aa, Artificial Sequence
  Description of Artificial Sequence: Synthetic peptide
WIGRIDPGSGGTRYNEKFQSKAT

SEQ ID NO: 978 - protein, 23 aa, Artificial Sequence
  Description of Artificial Sequence: Synthetic peptide
WIGYIDPGNGGTNYNQKFQSKAT

SEQ ID NO: 979 - protein, 23 aa, Artificial Sequence
  Description of Artificial Sequence: Synthetic peptide
WIGYIDPGNGGTRYNQQFQGKAT

SEQ ID NO: 980 - protein, 23 aa, Artificial Sequence
  Description of Artificial Sequence: Synthetic peptide
WIGWIDPGSGGTRYNQKFQSKAT

SEQ ID NO: 981 - protein, 23 aa, Artificial Sequence
  Description of Artificial Sequence: Synthetic peptide
WIGYIDPGNGGTRYNEKFQSKAT

SEQ ID NO: 982 - protein, 23 aa, Artificial Sequence
  Description of Artificial Sequence: Synthetic peptide
WIGYIDPGSGGTRYNQKFKSKAT

SEQ ID NO: 983 - protein, 23 aa, Artificial Sequence
  Description of Artificial Sequence: Synthetic peptide
WIGRIDPGNGGTRYNEKFQGKAT

SEQ ID NO: 984 - protein, 23 aa, Artificial Sequence
  Description of Artificial Sequence: Synthetic peptide
WIGWIDPGNGGTKYNQKFQSKAT

SEQ ID NO: 985 - protein, 23 aa, Artificial Sequence
  Description of Artificial Sequence: Synthetic peptide
WIGWIDPGSGGTRYNEKFQGKAT

SEQ ID NO: 986 - protein, 23 aa, Artificial Sequence
  Description of Artificial Sequence: Synthetic peptide
WIGRIDPSNGGTKYNQKFKGKAT

SEQ ID NO: 987 - protein, 23 aa, Artificial Sequence
  Description of Artificial Sequence: Synthetic peptide
WIGRINPNSGGTKYNEKFKGKAT

SEQ ID NO: 988 - protein, 23 aa, Artificial Sequence
  Description of Artificial Sequence: Synthetic peptide
WIGRIDPGSGGTKYNQKFKGKAT

SEQ ID NO: 989 - protein, 23 aa, Artificial Sequence
  Description of Artificial Sequence: Synthetic peptide
WVGRISPSGGSTYYADSVKGRFT

SEQ ID NO: 990 - protein, 23 aa, Artificial Sequence
  Description of Artificial Sequence: Synthetic peptide
WIGRINPGSGGTKYDEKFKGRAT

SEQ ID NO: 991 - protein, 23 aa, Artificial Sequence
  Description of Artificial Sequence: Synthetic peptide
WIGWINPDSGSTKYAEKFKGRAT

SEQ ID NO: 992 - protein, 23 aa, Artificial Sequence
  Description of Artificial Sequence: Synthetic peptide
WIGRIDPSSGGTKYNQKFKGKAT

SEQ ID NO: 993 - protein, 23 aa, Artificial Sequence
  Description of Artificial Sequence: Synthetic peptide
WVGRISPGGGTTYYADSVKGRFT

SEQ ID NO: 994 - protein, 23 aa, Artificial Sequence
  Description of Artificial Sequence: Synthetic peptide
WIGRINPGSGGTNYDEKFKGRAT

SEQ ID NO: 995 - protein, 23 aa, Artificial Sequence
  Description of Artificial Sequence: Synthetic peptide
WIGRINPKQRWHKYNQKFKGKVT

SEQ ID NO: 996 - protein, 23 aa, Artificial Sequence
  Description of Artificial Sequence: Synthetic peptide
WIGLDRPRQRWHQLNEKFQGRAT

SEQ ID NO: 997 - protein, 23 aa, Artificial Sequence
  Description of Artificial Sequence: Synthetic peptide
SIGRIDPGSGGTKYNEKFQGRAT

SEQ ID NO: 998 - protein, 24 aa, Artificial Sequence
  Description of Artificial Sequence: Synthetic peptide
WIGLDRPKQRVGTKYNQKFQGRVT

SEQ ID NO: 999 - protein, 23 aa, Artificial Sequence
  Description of Artificial Sequence: Synthetic peptide
WIGLDRPRQRWPKYNEKFKGRAT

SEQ ID NO: 1000 - protein, 23 aa, Artificial Sequence
  Description of Artificial Sequence: Synthetic peptide
WIGLDRPKQRWHQYNEKFQGRAT

SEQ ID NO: 1001 - protein, 24 aa, Artificial Sequence
  Description of Artificial Sequence: Synthetic peptide
WIGSDRPRQRVAPKYNQKFKGRAT

SEQ ID NO: 1002 - protein, 23 aa, Artificial Sequence
  Description of Artificial Sequence: Synthetic peptide
WIGRIDPSSGGTKYNQKFQGRVT

SEQ ID NO: 1003 - protein, 23 aa, Artificial Sequence
  Description of Artificial Sequence: Synthetic peptide
WIGLDRPKQRGTKYNQKFQGRAT

SEQ ID NO: 1004 - protein, 23 aa, Artificial Sequence
  Description of Artificial Sequence: Synthetic peptide
WIGSDRPRQRWHQVQRKFKGRAT

SEQ ID NO: 1005 - protein, 23 aa, Artificial Sequence
  Description of Artificial Sequence: Synthetic peptide
WIGRIDPNSGGTKYNEKFQGRAT

SEQ ID NO: 1006 - protein, 23 aa, Artificial Sequence
  Description of Artificial Sequence: Synthetic peptide
WIGRINPSSGGTNYNEQFQGRAT

SEQ ID NO: 1007 - protein, 23 aa, Artificial Sequence
  Description of Artificial Sequence: Synthetic peptide
WIGSDRPRQRWHQVQPKVQGRAT

SEQ ID NO: 1008 - protein, 23 aa, Artificial Sequence
  Description of Artificial Sequence: Synthetic peptide
WIGRIDPNSGGTKQNEKFQGRAT

SEQ ID NO: 1009 - protein, 23 aa, Artificial Sequence
  Description of Artificial Sequence: Synthetic peptide
SIGRIDPGSGGTKYNQKFQGRAT

SEQ ID NO: 1010 - protein, 23 aa, Artificial Sequence
  Description of Artificial Sequence: Synthetic peptide
WIGLDRPRQRWHQVNEKFQGRAT

SEQ ID NO: 1011 - protein, 23 aa, Artificial Sequence
  Description of Artificial Sequence: Synthetic peptide
WIGRIDPGNGGTKYNEKFKGKVT

SEQ ID NO: 1012 - protein, 23 aa, Artificial Sequence
  Description of Artificial Sequence: Synthetic peptide
WIGRIDPGSGGTKYNEKFQGKVT

SEQ ID NO: 1013 - protein, 23 aa, Artificial Sequence
  Description of Artificial Sequence: Synthetic peptide
WIGQDRPKYGGTKYNEKFKGRVT

SEQ ID NO: 1014 - protein, 23 aa, Artificial Sequence
  Description of Artificial Sequence: Synthetic peptide
WIGRINPSNGGTKYNEKFKGRAT

SEQ ID NO: 1015 - protein, 24 aa, Artificial Sequence
  Description of Artificial Sequence: Synthetic peptide
WIGSDRPRQRWGTKYNEKFQGRVT

SEQ ID NO: 1016 - protein, 23 aa, Artificial Sequence
  Description of Artificial Sequence: Synthetic peptide
WIGWINPSNGGTKYNEKFKGRAT

SEQ ID NO: 1017 - protein, 23 aa, Artificial Sequence
  Description of Artificial Sequence: Synthetic peptide
WIGSDQPRQGGTKYNEKFKGRAT

SEQ ID NO: 1018 - protein, 23 aa, Artificial Sequence
  Description of Artificial Sequence: Synthetic peptide
WIGSDRPRQGGTKYNEKFKDRVT

SEQ ID NO: 1019 - protein, 23 aa, Artificial Sequence
  Description of Artificial Sequence: Synthetic peptide
WIGSDRPKQRGTKYNEKFKGKVT

SEQ ID NO: 1020 - protein, 23 aa, Artificial Sequence
  Description of Artificial Sequence: Synthetic peptide
SIGRINPGSGGTKYNEKFQGRAT

SEQ ID NO: 1021 - protein, 23 aa, Artificial Sequence
  Description of Artificial Sequence: Synthetic peptide
WIGSDRPKQRWHQVNEKFQGKVT

SEQ ID NO: 1022 - protein, 23 aa, Artificial Sequence
  Description of Artificial Sequence: Synthetic peptide
WIGRIDPDSGGTKYNEKFQGRAT

SEQ ID NO: 1023 - protein, 23 aa, Artificial Sequence
  Description of Artificial Sequence: Synthetic peptide
WIGRIDPGNGGTKYNEKFKGKAT

SEQ ID NO: 1024 - protein, 23 aa, Artificial Sequence
  Description of Artificial Sequence: Synthetic peptide
WIGRIDPGSGGTKYNEKFQGRAT

SEQ ID NO: 1025 - protein, 23 aa, Artificial Sequence
  Description of Artificial Sequence: Synthetic peptide
WIGRINPDNGGTKYNEKFQGRVT

SEQ ID NO: 1026 - protein, 23 aa, Artificial Sequence
  Description of Artificial Sequence: Synthetic peptide
WIGRDQPRQGGTNYNEKFQGRAT

SEQ ID NO: 1027 - protein, 23 aa, Artificial Sequence
  Description of Artificial Sequence: Synthetic peptide
WIGRINPNNGGTKYNEKFQGKAT

SEQ ID NO: 1028 - protein, 23 aa, Artificial Sequence
  Description of Artificial Sequence: Synthetic peptide
WIGSDRPRQGGTKYNEKFKGRVT

SEQ ID NO: 1029 - protein, 23 aa, Artificial Sequence
  Description of Artificial Sequence: Synthetic peptide
WIGRIDPGSGGTKYNEKFQGRVT

SEQ ID NO: 1030 - protein, 24 aa, Artificial Sequence
  Description of Artificial Sequence: Synthetic peptide
WIGSDRPKQRWAPKYNEKFKGRAT

SEQ ID NO: 1031 - protein, 23 aa, Artificial Sequence
  Description of Artificial Sequence: Synthetic peptide
WIGSDQPRQRWHQVQPKVQGRVT

SEQ ID NO: 1032 - protein, 23 aa, Artificial Sequence
  Description of Artificial Sequence: Synthetic peptide
WIGRINPGNGGTKQNEKFKGRAT

SEQ ID NO: 1033 - protein, 23 aa, Artificial Sequence
  Description of Artificial Sequence: Synthetic peptide
WIGRINPSSGGTKYNEKFKGRAT

SEQ ID NO: 1034 - protein, 23 aa, Artificial Sequence
  Description of Artificial Sequence: Synthetic peptide
WIGRINPNSGGTKYNEKFKGRVT

SEQ ID NO: 1035 - protein, 23 aa, Artificial Sequence
  Description of Artificial Sequence: Synthetic peptide
WIGRIDPGSGGTKYNQKFKGRTT

SEQ ID NO: 1036 - protein, 23 aa, Artificial Sequence
  Description of Artificial Sequence: Synthetic peptide
WIGWIDPGSGGTKYQDKFKGKAT

SEQ ID NO: 1037 - protein, 23 aa, Artificial Sequence
  Description of Artificial Sequence: Synthetic peptide
WIGWIDPGSGGTKYQEKFKGKVT

SEQ ID NO: 1038 - protein, 23 aa, Artificial Sequence
  Description of Artificial Sequence: Synthetic peptide
WIGWIDPGSGGTKYQEKFKGKAT

SEQ ID NO: 1039 - protein, 23 aa, Artificial Sequence
  Description of Artificial Sequence: Synthetic peptide
WIGWIDPGSGGTNYQEKFKGKAT

SEQ ID NO: 1040 - protein, 23 aa, Artificial Sequence
  Description of Artificial Sequence: Synthetic peptide
WIGWIDPGSGGTNYQQKFKGKAT

SEQ ID NO: 1041 - protein, 23 aa, Artificial Sequence
  Description of Artificial Sequence: Synthetic peptide
WIGWIDPGSGGTKYADKFKGKAT

SEQ ID NO: 1042 - protein, 23 aa, Artificial Sequence
  Description of Artificial Sequence: Synthetic peptide
WIGWIDPGSGGTKYEEKFKGKAT

SEQ ID NO: 1043 - protein, 23 aa, Artificial Sequence
  Description of Artificial Sequence: Synthetic peptide
WIGWIDPGSGGTKYNDKFKGKAT

SEQ ID NO: 1044 - protein, 23 aa, Artificial Sequence
  Description of Artificial Sequence: Synthetic peptide
WIGWIDPGSGGTKYYEKFKGKAT

SEQ ID NO: 1045 - protein, 23 aa, Artificial Sequence
  Description of Artificial Sequence: Synthetic peptide
WIGWIDPGSGGTKYEDKFEGKAT

SEQ ID NO: 1046 - protein, 23 aa, Artificial Sequence
  Description of Artificial Sequence: Synthetic peptide
WIGWIDPGSGGTNYTQKFKGKAT

SEQ ID NO: 1047 - protein, 23 aa, Artificial Sequence
  Description of Artificial Sequence: Synthetic peptide
WIGWIDPGSGGTKYSHKFKGKAT

SEQ ID NO: 1048 - protein, 15 aa, Artificial Sequence
  Description of Artificial Sequence: Synthetic peptide
CARERYGYYFDYWGQ

SEQ ID NO: 1049 - protein, 15 aa, Artificial Sequence
  Description of Artificial Sequence: Synthetic peptide
CARARVGYSLDYWGQ

SEQ ID NO: 1050 - protein, 15 aa, Artificial Sequence
  Description of Artificial Sequence: Synthetic peptide
CARYRVGYSLDYWGQ

SEQ ID NO: 1051 - protein, 15 aa, Artificial Sequence
  Description of Artificial Sequence: Synthetic peptide
CARQRVGYSLDYWGQ

SEQ ID NO: 1052 - protein, 15 aa, Artificial Sequence
  Description of Artificial Sequence: Synthetic peptide
CARANDGYSFDYWGQ

SEQ ID NO: 1053 - protein, 15 aa, Artificial Sequence
  Description of Artificial Sequence: Synthetic peptide
CARARVGYSFDYWGQ

SEQ ID NO: 1054 - protein, 15 aa, Artificial Sequence
  Description of Artificial Sequence: Synthetic peptide
CARSRVGYSFDYWGQ

SEQ ID NO: 1055 - protein, 15 aa, Artificial Sequence
  Description of Artificial Sequence: Synthetic peptide
CARYRSGYSLDYWGQ

SEQ ID NO: 1056 - protein, 15 aa, Artificial Sequence
  Description of Artificial Sequence: Synthetic peptide
CARERVGYSLDYWGQ

SEQ ID NO: 1057 - protein, 15 aa, Artificial Sequence
  Description of Artificial Sequence: Synthetic peptide
CARHRVGYSLDFWGQ

SEQ ID NO: 1058 - protein, 15 aa, Artificial Sequence
  Description of Artificial Sequence: Synthetic peptide
CARYHYGYSFDYWGQ

SEQ ID NO: 1059 - protein, 15 aa, Artificial Sequence
  Description of Artificial Sequence: Synthetic peptide
CARYHDGYSFDYWGQ

SEQ ID NO: 1060 - protein, 15 aa, Artificial Sequence
  Description of Artificial Sequence: Synthetic peptide
CARERFAYYLDYWGQ

SEQ ID NO: 1061 - protein, 15 aa, Artificial Sequence
  Description of Artificial Sequence: Synthetic peptide
CARSRDGYYFDYWGQ

SEQ ID NO: 1062 - protein, 15 aa, Artificial Sequence
  Description of Artificial Sequence: Synthetic peptide
CARARDGYSFDYWGQ

SEQ ID NO: 1063 - protein, 15 aa, Artificial Sequence
  Description of Artificial Sequence: Synthetic peptide
CARERAGYYLDYWGQ

SEQ ID NO: 1064 - protein, 15 aa, Artificial Sequence
  Description of Artificial Sequence: Synthetic peptide
CARHRVGYYFDYWGQ

SEQ ID NO: 1065 - protein, 15 aa, Artificial Sequence
  Description of Artificial Sequence: Synthetic peptide
CARANVGYSFDYWGQ

SEQ ID NO: 1066 - protein, 14 aa, Artificial Sequence
  Description of Artificial Sequence: Synthetic peptide
  MOD_RES (8)..(8): Any amino acid
CARARVGXSFDYWG

SEQ ID NO: 1067 - protein, 15 aa, Artificial Sequence
  Description of Artificial Sequence: Synthetic peptide
CARSHVGYYFDYWGQ

SEQ ID NO: 1068 - protein, 15 aa, Artificial Sequence
  Description of Artificial Sequence: Synthetic peptide
CARHRVGYSLDYWGQ

SEQ ID NO: 1069 - protein, 15 aa, Artificial Sequence
  Description of Artificial Sequence: Synthetic peptide
CARSRVGYSLDYWGQ

SEQ ID NO: 1070 - protein, 15 aa, Artificial Sequence
  Description of Artificial Sequence: Synthetic peptide
CARYRDGYSFDYWGQ

SEQ ID NO: 1071 - protein, 15 aa, Artificial Sequence
  Description of Artificial Sequence: Synthetic peptide
CARDRVGYSLDYWGQ

SEQ ID NO: 1072 - protein, 15 aa, Artificial Sequence
  Description of Artificial Sequence: Synthetic peptide
CARQRVGYNLDYWGQ

SEQ ID NO: 1073 - protein, 15 aa, Artificial Sequence
  Description of Artificial Sequence: Synthetic peptide
CARQRVGYSLDYWGE

SEQ ID NO: 1074 - protein, 15 aa, Artificial Sequence
  Description of Artificial Sequence: Synthetic peptide
CARSRDGYSLDYWGQ

SEQ ID NO: 1075 - protein, 15 aa, Artificial Sequence
  Description of Artificial Sequence: Synthetic peptide
CARYRSGYYLDYWGQ

SEQ ID NO: 1076 - protein, 15 aa, Artificial Sequence
  Description of Artificial Sequence: Synthetic peptide
CARYRVGYSFDYWGQ

SEQ ID NO: 1077 - protein, 15 aa, Artificial Sequence
  Description of Artificial Sequence: Synthetic peptide
CARSRDGYSFDYWGQ

SEQ ID NO: 1078 - protein, 15 aa, Artificial Sequence
  Description of Artificial Sequence: Synthetic peptide
CARARDGYSLDYWGQ

SEQ ID NO: 1079 - protein, 15 aa, Artificial Sequence
  Description of Artificial Sequence: Synthetic peptide
CARHRVGYSFDYWGQ

SEQ ID NO: 1080 - protein, 15 aa, Artificial Sequence
  Description of Artificial Sequence: Synthetic peptide
CARADVGYSFDYWGQ

SEQ ID NO: 1081 - protein, 15 aa, Artificial Sequence
  Description of Artificial Sequence: Synthetic peptide
CARGFVYYSFDYWGQ

SEQ ID NO: 1082 - protein, 15 aa, Artificial Sequence
  Description of Artificial Sequence: Synthetic peptide
CARGFIYYSFDYWGQ

SEQ ID NO: 1083 - protein, 15 aa, Artificial Sequence
  Description of Artificial Sequence: Synthetic peptide
CARGFLYYSFDYWGQ

SEQ ID NO: 1084 - protein, 15 aa, Artificial Sequence
  Description of Artificial Sequence: Synthetic peptide
CARGRIYYSFDYWGQ

SEQ ID NO: 1085 - protein, 15 aa, Artificial Sequence
  Description of Artificial Sequence: Synthetic peptide
CARGRFYYSFDYWGQ

SEQ ID NO: 1086 - protein, 15 aa, Artificial Sequence
  Description of Artificial Sequence: Synthetic peptide
CARGRLYYSLDYWGQ

SEQ ID NO: 1087 - protein, 15 aa, Artificial Sequence
  Description of Artificial Sequence: Synthetic peptide
CARGFIYYDFDYWGQ

SEQ ID NO: 1088 - protein, 15 aa, Artificial Sequence
  Description of Artificial Sequence: Synthetic peptide
CARGKIYYSFDYWGQ

SEQ ID NO: 1089 - protein, 15 aa, Artificial Sequence
  Description of Artificial Sequence: Synthetic peptide
CARGYLYYSFDYWGQ

SEQ ID NO: 1090 - protein, 15 aa, Artificial Sequence
  Description of Artificial Sequence: Synthetic peptide
CARGFIYYSLDYWGQ

SEQ ID NO: 1091 - protein, 15 aa, Artificial Sequence
  Description of Artificial Sequence: Synthetic peptide
CARGNLYYSLDYWGQ

SEQ ID NO: 1092 - protein, 15 aa, Artificial Sequence
  Description of Artificial Sequence: Synthetic peptide
CSRGKVGYSLDYWGQ

SEQ ID NO: 1093 - protein, 15 aa, Artificial Sequence
  Description of Artificial Sequence: Synthetic peptide
CARGSIGYNLDYWGQ

SEQ ID NO: 1094 - protein, 15 aa, Artificial Sequence
  Description of Artificial Sequence: Synthetic peptide
CARGRDGYSLDYWGQ

SEQ ID NO: 1095 - protein, 15 aa, Artificial Sequence
  Description of Artificial Sequence: Synthetic peptide
CAREKYGYYFDYWGQ

SEQ ID NO: 1096 - protein, 15 aa, Artificial Sequence
  Description of Artificial Sequence: Synthetic peptide
CARYKSGWYFDYWGQ

SEQ ID NO: 1097 - protein, 15 aa, Artificial Sequence
  Description of Artificial Sequence: Synthetic peptide
CARYRSGYYFDYWGQ

SEQ ID NO: 1098 - protein, 15 aa, Artificial Sequence
  Description of Artificial Sequence: Synthetic peptide
CARYKSGYYFDYWGQ

SEQ ID NO: 1099 - protein, 15 aa, Artificial Sequence
  Description of Artificial Sequence: Synthetic peptide
CAREKSGYYFDYWGQ

SEQ ID NO: 1100 - protein, 15 aa, Artificial Sequence
  Description of Artificial Sequence: Synthetic peptide
CARERSGYYFDYWGQ

SEQ ID NO: 1101 - protein, 17 aa, Artificial Sequence
  Description of Artificial Sequence: Synthetic peptide
ITCRASQYVGTYLNWYQ

SEQ ID NO: 1102 - protein, 17 aa, Artificial Sequence
  Description of Artificial Sequence: Synthetic peptide
ITCRASQYVGSYLNWYQ

SEQ ID NO: 1103 - protein, 17 aa, Artificial Sequence
  Description of Artificial Sequence: Synthetic peptide
ITCRASQYIGSYLNWYQ

SEQ ID NO: 1104 - protein, 17 aa, Artificial Sequence
  Description of Artificial Sequence: Synthetic peptide
ITCRASQAISNYLTWYQ

SEQ ID NO: 1105 - protein, 17 aa, Artificial Sequence
  Description of Artificial Sequence: Synthetic peptide
ITCRASQYVGSYLTWYQ

SEQ ID NO: 1106 - protein, 17 aa, Artificial Sequence
  Description of Artificial Sequence: Synthetic peptide
ITCRASQDVSNYLNWYQ

SEQ ID NO: 1107 - protein, 17 aa, Artificial Sequence
  Description of Artificial Sequence: Synthetic peptide
ITCQASQYVGSYLSWYQ

SEQ ID NO: 1108 - protein, 17 aa, Artificial Sequence
  Description of Artificial Sequence: Synthetic peptide
ITCRASQYVGSYLSWYQ

SEQ ID NO: 1109 - protein, 13 aa, Artificial Sequence
  Description of Artificial Sequence: Synthetic peptide
LIYDASNRATGIP

SEQ ID NO: 1110 - protein, 13 aa, Artificial Sequence
  Description of Artificial Sequence: Synthetic peptide
LIYAASSLQSGVP

SEQ ID NO: 1111 - protein, 13 aa, Artificial Sequence
  Description of Artificial Sequence: Synthetic peptide
LIYDAANRATGIP

SEQ ID NO: 1112 - protein, 13 aa, Artificial Sequence
  Description of Artificial Sequence: Synthetic peptide
LIYDASNRAAGIP

SEQ ID NO: 1113 - protein, 13 aa, Artificial Sequence
  Description of Artificial Sequence: Synthetic peptide
LIYDASNRASGIP

SEQ ID NO: 1114 - protein, 16 aa, Artificial Sequence
  Description of Artificial Sequence: Synthetic peptide
YYCQVWDSSPPVAFGG

SEQ ID NO: 1115 - protein, 16 aa, Artificial Sequence
  Description of Artificial Sequence: Synthetic peptide
YYCQVWDSSPPVVFGG

SEQ ID NO: 1116 - protein, 16 aa, Artificial Sequence
  Description of Artificial Sequence: Synthetic peptide
YYCQVWDSSPPLVFGG

SEQ ID NO: 1117 - protein, 16 aa, Artificial Sequence
  Description of Artificial Sequence: Synthetic peptide
YYCQVWDSSPPLAFGG

SEQ ID NO: 1118 - protein, 16 aa, Artificial Sequence
  Description of Artificial Sequence: Synthetic peptide
YYCQAWDSSPPVVFGG

SEQ ID NO: 1119 - protein, 16 aa, Artificial Sequence
  Description of Artificial Sequence: Synthetic peptide
YYCQVWDSSPPVMFGG

SEQ ID NO: 1120 - protein, 14 aa, Artificial Sequence
  Description of Artificial Sequence: Synthetic peptide
YYCQGWDSSPTFGG

SEQ ID NO: 1121 - protein, 16 aa, Artificial Sequence
  Description of Artificial Sequence: Synthetic peptide
YYCQVWDNSPPVVFGG

SEQ ID NO: 1122 - protein, 16 aa, Artificial Sequence
  Description of Artificial Sequence: Synthetic peptide
YYCQAWDSSPPVTFGD

SEQ ID NO: 1123 - protein, 14 aa, Artificial Sequence
  Description of Artificial Sequence: Synthetic peptide
YYCQQSGSYLTFGG

SEQ ID NO: 1124 - protein, 16 aa, Artificial Sequence
  Description of Artificial Sequence: Synthetic peptide
YYCQVWDSYHAVVFGG

SEQ ID NO: 1125 - protein, 16 aa, Artificial Sequence
  Description of Artificial Sequence: Synthetic peptide
YYCQVWGSYHAVMFGG

SEQ ID NO: 1126 - protein, 16 aa, Artificial Sequence
  Description of Artificial Sequence: Synthetic peptide
YYCQVWGSYHSVMFGG

SEQ ID NO: 1127 - protein, 16 aa, Artificial Sequence
  Description of Artificial Sequence: Synthetic peptide
YYCQVWDTDHSVVFGG

SEQ ID NO: 1128 - protein, 16 aa, Artificial Sequence
  Description of Artificial Sequence: Synthetic peptide
YYCQVWDTDHAVAFGG

SEQ ID NO: 1129 - protein, 16 aa, Artificial Sequence
  Description of Artificial Sequence: Synthetic peptide
YYCQVWDSSHSVIFGG

SEQ ID NO: 1130 - protein, 16 aa, Artificial Sequence
  Description of Artificial Sequence: Synthetic peptide
YYCQVWDSYPPVVFGG

SEQ ID NO: 1131 - protein, 16 aa, Artificial Sequence
  Description of Artificial Sequence: Synthetic peptide
YYCQVWDSDHAVVFGG

SEQ ID NO: 1132 - protein, 16 aa, Artificial Sequence
  Description of Artificial Sequence: Synthetic peptide
YYCQVWGSNHASLFGG

SEQ ID NO: 1133 - protein, 16 aa, Artificial Sequence
  Description of Artificial Sequence: Synthetic peptide
YYCQVWGSTARVAFGG

SEQ ID NO: 1134 - protein, 16 aa, Artificial Sequence
  Description of Artificial Sequence: Synthetic peptide
YYCQVWNSTPPVVFGG

SEQ ID NO: 1135 - protein, 16 aa, Artificial Sequence
  Description of Artificial Sequence: Synthetic peptide
YYCQVWSSSPPVIFGG

SEQ ID NO: 1136 - protein, 16 aa, Artificial Sequence
  Description of Artificial Sequence: Synthetic peptide
YYCQVWSSSPPVVFGG

SEQ ID NO: 1137 - protein, 16 aa, Artificial Sequence
  Description of Artificial Sequence: Synthetic peptide
YYCQVWSSNHAVVFGG

SEQ ID NO: 1138 - protein, 16 aa, Artificial Sequence
  Description of Artificial Sequence: Synthetic peptide
YYCQVWGSNPPVAFGG

SEQ ID NO: 1139 - protein, 16 aa, Artificial Sequence
  Description of Artificial Sequence: Synthetic peptide
YYCQVWDSTPPVVFGG

SEQ ID NO: 1140 - protein, 16 aa, Artificial Sequence
  Description of Artificial Sequence: Synthetic peptide
YYCQVWDSNPPVVFGG

SEQ ID NO: 1141 - protein, 16 aa, Artificial Sequence
  Description of Artificial Sequence: Synthetic peptide
YYCQGYSSNDGVIFGG

SEQ ID NO: 1142 - protein, 16 aa, Artificial Sequence
  Description of Artificial Sequence: Synthetic peptide
YYCQVWGSNHSVVFGG

SEQ ID NO: 1143 - protein, 16 aa, Artificial Sequence
  Description of Artificial Sequence: Synthetic peptide
YYCQVWDSNHSVVFGG

SEQ ID NO: 1144 - protein, 16 aa, Artificial Sequence
  Description of Artificial Sequence: Synthetic peptide
YYCQVWDSSSAVVFGG

SEQ ID NO: 1145 - protein, 121 aa, Artificial Sequence
  Description of Artificial Sequence: Synthetic polypeptide
  MOD_RES (23)..(25): Any amino acid
  MOD_RES (27)..(35): Any amino acid
  MOD_RES (37)..(38): Any amino acid
  MOD_RES (48)..(69): Any amino acid
  MOD_RES (97)..(110): Any amino acid
  MOD_RES (113)..(113): Any amino acid
EVQLLESGGGLVQPGGSLRLSCXXXGXXXXXXXXXWXXQAPGKGLEWXXXXXXXXXXXXXXXXXXXXXXISRDNSKNTLYLQMNSLRAEDTAVYYCXXXXXXXXXXXXXXWGXGTLVTVSS

SEQ ID NO: 1146 - protein, 109 aa, Artificial Sequence
  Description of Artificial Sequence: Synthetic polypeptide
  MOD_RES (21)..(22): Any amino acid
  MOD_RES (24)..(34): Any amino acid
  MOD_RES (36)..(37): Any amino acid
  MOD_RES (49)..(56): Any amino acid
  MOD_RES (58)..(58): Any amino acid
  MOD_RES (89)..(99): Any amino acid
  MOD_RES (102)..(102): Any amino acid
DIQMTQSPSSLSASVGDRVTXXCXXXXXXXXXXXWXXQKPGKAPKLLIXXXXXXXXGXPSRFSGSGSGTDFTLTISSLQPEDFATYYCXXXXXXXXXXXFGXGTKVEIK

SEQ ID NO: 1147 - protein, 109 aa, Artificial Sequence
  Description of Artificial Sequence: Synthetic polypeptide
  MOD_RES (21)..(22): Any amino acid
  MOD_RES (24)..(34): Any amino acid
  MOD_RES (36)..(37): Any amino acid
  MOD_RES (49)..(56): Any amino acid
  MOD_RES (58)..(58): Any amino acid
  MOD_RES (89)..(99): Any amino acid
  MOD_RES (102)..(102): Any amino acid
EIVLTQSPATLSLSPGERATXXCXXXXXXXXXXXWXXQKPGQAPRLLIXXXXXXXXGXPARFSGSGSGTDFTLTISSLEPEDFAVYYCXXXXXXXXXXXFGXGTKVEIK

SEQ ID NO: 1148 - protein, 109 aa, Artificial Sequence
  Description of Artificial Sequence: Synthetic polypeptide
  MOD_RES (20)..(21): Any amino acid
  MOD_RES (23)..(33): Any amino acid
  MOD_RES (35)..(35): Any amino acid
  MOD_RES (46)..(57): Any amino acid
  MOD_RES (86)..(86): Any amino acid
  MOD_RES (88)..(99): Any amino acid
  MOD_RES (102)..(102): Any amino acid
QSVLTQPPSVSGAPGQRVTXXCXXXXXXXXXXXWXQQLPGTAPKLXXXXXXXXXXXXPDRFSGSKSGTSASLAITGLQAEDEADYXCXXXXXXXXXXXXFGXGTKLTVL

SEQ ID NO: 1149 - protein, 16 aa, Artificial Sequence
  Description of Artificial Sequence: Synthetic peptide
  MOD_RES (1)..(1): Lys or Ala
  MOD_RES (5)..(5): Phe or Tyr
  MOD_RES (6)..(6): Thr or Ser
  MOD_RES (8)..(8): Ser or Thr
  MOD_RES (9)..(9): Asp, Gly, Asn, Ser, Ala or Tyr
  MOD_RES (11)..(11): Tyr, Ala, Gly, Ser or Trp
  MOD_RES (12)..(12): Met or Ile
  MOD_RES (13)..(13): His, Pro, Ser, Tyr or Asn
  MOD_RES (16)..(16): Arg or Lys
XASGXXFXXYXXXWVX

SEQ ID NO: 1150 - protein, 17 aa, Artificial Sequence
  Description of Artificial Sequence: Synthetic peptide
  MOD_RES (8)..(8): Ser or Thr
  MOD_RES (10)..(10): Asp or Gly
  MOD_RES (12)..(12): Ala, Asp, Phe, His, Leu, Pro, Ser, Val or Tyr
  MOD_RES (14)..(14): Asp, Gly, His, Asn, Arg or Ser
TVTGYSIXSXYXWXWIR

SEQ ID NO: 1151 - protein, 18 aa, Artificial Sequence
  Description of Artificial Sequence: Synthetic peptide
  MOD_RES (2)..(2): Phe or Val
  MOD_RES (5)..(5): Phe, Asp or Gly
  MOD_RES (7)..(7): Leu or Ile
  MOD_RES (8)..(8): Ser, Thr or Asn
  MOD_RES (9)..(9): Thr or Ser
  MOD_RES (10)..(10): Ser, Thr or Gly
  MOD_RES (11)..(11): Gly, Ala or Asp
  MOD_RES (12)..(12): Met, Val or Tyr
  MOD_RES (13)..(13): Gly or Tyr
  MOD_RES (14)..(14): Val or Trp
  MOD_RES (15)..(15): Ala, Gly, Ser or Thr
TXSGXSXXXXXXXXXWIR

SEQ ID NO: 1152 - protein, 22 aa, Artificial Sequence
  Description of Artificial Sequence: Synthetic peptide
  MOD_RES (2)..(2): Ile or Val
  MOD_RES (4)..(4): Asp, Val, Ala, Ser, Phe, Glu, Tyr or Leu
  MOD_RES (6)..(6): Trp, Ser, Asn, Thr or Tyr
  MOD_RES (7)..(7): Tyr, His or Ser
  MOD_RES (8)..(8): Ser, Asp, Gly or Asn
  MOD_RES (12)..(12): Asn or Tyr
  MOD_RES (14)..(14): Asn, Ala, Asp or Thr
  MOD_RES (15)..(15): Pro or Asp
  MOD_RES (17)..(17): Leu or Val
  MOD_RES (19)..(19): Ser or Gly
  MOD_RES (21)..(21): Val or Phe
WXGXIXXXGSTXYXXSXKXRXT

SEQ ID NO: 1153 - protein, 23 aa, Artificial Sequence
  Description of Artificial Sequence: Synthetic peptide
  MOD_RES (2)..(2): Ile or Val
  MOD_RES (4)..(4): Arg, Tyr or Trp
  MOD_RES (6)..(6): Asn, Asp, Ser, Thr or Tyr
  MOD_RES (7)..(7): Pro or Tyr
  MOD_RES (8)..(8): Ser, Tyr, Asp, Gly or Asn
  MOD_RES (9)..(9): Ser, Asn or Gly
  MOD_RES (10)..(10): Gly or Ser
  MOD_RES (11)..(11): Gly, Thr, Ser, Ala, Asp or Asn
  MOD_RES (12)..(12): Thr, Asn, Ser or Tyr
  MOD_RES (13)..(13): Lys, Asn or Tyr
  MOD_RES (14)..(14): Tyr or Asn
  MOD_RES (15)..(15): Asn, Pro, Ala, Asp or Thr
  MOD_RES (16)..(16): Glu, Gln, Asp, Ala, Ser or Tyr
  MOD_RES (17)..(17): Lys, Leu or Ser
  MOD_RES (18)..(18): Phe, Lys or Val
  MOD_RES (19)..(19): Lys, Asn, Arg or Ser
  MOD_RES (20)..(20): Gly or Arg
  MOD_RES (21)..(21): Arg or Lys
  MOD_RES (22)..(22): Ala, Thr or Phe
  MOD_RES (23)..(23): Thr or Ile
WXGXIXXXXXXXXXXXXXXXXXX

SEQ ID NO: 1154 - protein, 25 aa, Artificial Sequence
  Description of Artificial Sequence: Synthetic peptide
  MOD_RES (2)..(2): Val or Ile
  MOD_RES (6)..(6): Arg, Asp, Asn or Tyr
  MOD_RES (7)..(7): Asn, Pro or Ser
  MOD_RES (8)..(8): Lys, Asp, Gly, Asn or Ser
  MOD_RES (9)..(9): Ser, Ala or Thr
  MOD_RES (10)..(10): Gly, Asp or Asn
  MOD_RES (12)..(12): Tyr, Thr or Gly
  MOD_RES (13)..(13): Lys, Thr or Asn
  MOD_RES (14)..(14): Tyr or Thr
  MOD_RES (15)..(15): Asn, Asp or Glu
  MOD_RES (16)..(16): Tyr, Glu or Gln
  MOD_RES (17)..(17): Ala or Lys
  MOD_RES (18)..(18): Ala or Phe
  MOD_RES (19)..(19): Lys or Ser
  MOD_RES (20)..(20): Gly, Val or Ser
  MOD_RES (22)..(22): Ala or Gly
  MOD_RES (23)..(23): Arg or Thr
  MOD_RES (24)..(24): Leu or Phe
WXGRIXXXXXGXXXXXXXXXKXXXT

SEQ ID NO: 1155 - protein, 11 aa, Artificial Sequence
  Description of Artificial Sequence: Synthetic peptide
  MOD_RES (4)..(4): Glu, Ala, Lys, Asp, Thr, Leu, Phe, Ile, Val, His, Asn, Tyr, Gln, Met, Gly, Pro, Arg, Ser or Trp
  MOD_RES (5)..(5): Ala, Gly, Thr, Asp, Ser, Glu, Lys, Asn, Arg, Phe, Leu, Tyr, His or Pro
  MOD_RES (6)..(6): Phe, Leu, Gly, Met, Arg, Tyr or Val
  MOD_RES (7)..(7): Ala or Asp
CARXXXXYWGQ

SEQ ID NO: 1156 - protein, 13 aa, Artificial Sequence
  Description of Artificial Sequence: Synthetic peptide
  MOD_RES (4)..(4): Ser, Tyr, Gly or Arg
  MOD_RES (5)..(5): Tyr, Asp, Gly, His, Ser, Arg or Asn
  MOD_RES (6)..(6): Gly, Tyr, Trp, Ser, Ala or Thr
  MOD_RES (7)..(7): Ala, Gly, Asp, Tyr or Ser
  MOD_RES (8)..(8): Phe, Ile, Leu or Met
  MOD_RES (9)..(9): Ala or Asp
  MOD_RES (10)..(10): Tyr, Asp, Phe or Val
CARXXXXXXXWGQ

SEQ ID NO: 1157 - protein, 14 aa, Artificial Sequence
  Description of Artificial Sequence: Synthetic peptide
  MOD_RES (2)..(2): Glu or Ala
  MOD_RES (4)..(4): Tyr, Asp, His, Glu, Phe, Leu, Ser, Gly, Val or Arg
  MOD_RES (5)..(5): Asp, Tyr, Ser, Gly, His or Arg
  MOD_RES (6)..(6): Ser, Tyr or Gly
  MOD_RES (7)..(7): Ser, Pro, Tyr, Asp, Gly or Asn
  MOD_RES (8)..(8): Pro, Ala, Leu, Asp, Met, Ser, Thr, Tyr, His, Phe or Val
  MOD_RES (9)..(9): Gly, Phe, Ile, Leu or Met
  MOD_RES (10)..(10): Asp or Ala
CXRXXXXXXXYWGQ

SEQ ID NO: 1158 - protein, 15 aa, Artificial Sequence
  Description of Artificial Sequence: Synthetic peptide
  MOD_RES (4)..(4): Ala, Gly, Asp, Thr, Glu, Lys, Arg, Asn, Ser, His, Pro or Tyr
  MOD_RES (5)..(5): Asp, Gly, Asn, Ser, His, Arg, Ala, Thr or Tyr
  MOD_RES (6)..(6): Gly, Arg, Asp, Tyr or Ser
  MOD_RES (7)..(7): Tyr, Trp, Arg, Ser, Lys, Asn, Gly or Asp
  MOD_RES (8)..(8): Asn, Ser, Gly, Tyr, Asp, Ala or Thr
  MOD_RES (9)..(9): Ala, Asp, His, Ser, Pro, Tyr, Gly or Trp
  MOD_RES (10)..(10): Phe, Met, Ile or Leu
  MOD_RES (11)..(11): Asp or Ala
  MOD_RES (12)..(12): Tyr, Asp, Phe or Val
CARXXXXXXXXXWGQ

SEQ ID NO: 1159 - protein, 16 aa, Artificial Sequence
  Description of Artificial Sequence: Synthetic peptide
  MOD_RES (4)..(4): Tyr, His, Gly, Glu, Asp, Ser, Lys, Asn or Arg
  MOD_RES (5)..(5): Tyr, Ser, Pro, His, Gly, Asp, Asn, Ala or Arg
  MOD_RES (6)..(6): Tyr, Ser, Arg, Phe, His, Gly, Leu or Pro
  MOD_RES (7)..(7): Gly, Ser, Asp, Tyr, Asn, Phe or Leu
  MOD_RES (8)..(8): Tyr, Ser, His, Gly, Asp, Pro or Asn
  MOD_RES (9)..(9): Tyr, Ala, Ser, Gly, Asp, Asn or Trp
  MOD_RES (10)..(10): Ala, Tyr, Asp, Ser, Gly, Arg, Trp, Pro or His
  MOD_RES (11)..(11): Phe, Ile, Leu, Met, Gly or Ser
  MOD_RES (12)..(12): Asp or Ala
  MOD_RES (13)..(13): Tyr, Asp, Phe or Val
CARXXXXXXXXXXWGQ

SEQ ID NO: 1160 - protein, 17 aa, Artificial Sequence
  Description of Artificial Sequence: Synthetic peptide
  MOD_RES (4)..(4): Gly, Asp, Ala, Glu, Tyr, Asn, Pro, Ser, Gln or Arg
  MOD_RES (5)..(5): His, Gly, Asp, Arg, Leu, Val, Asn, Tyr, Ser or Thr
  MOD_RES (6)..(6): Gly, Ser, Asp, Tyr, Phe, His, Asn, Leu or Val
  MOD_RES (7)..(7): Tyr, Gly, Arg, Asp or Ser
  MOD_RES (8)..(8): Thr, Gly, Ala, Ser, Leu, Pro, Arg or Val
  MOD_RES (9)..(9): Tyr, Ser, Gly, Phe, Asp or Asn
  MOD_RES (10)..(10): Tyr, Ser, Ala, Asp or Glu
  MOD_RES (11)..(11): Ala, Asp, Gly, Tyr, Ser, Asn or Thr
  MOD_RES (12)..(12): Phe, Ile, Leu or Met
  MOD_RES (13)..(13): Asp or Ala
  MOD_RES (14)..(14): Asp, Tyr, Phe or Val
CARXXXXXXXXXXXWGQ

SEQ ID NO: 1161 - protein, 18 aa, Artificial Sequence
  Description of Artificial Sequence: Synthetic peptide
  MOD_RES (2)..(2): Ala or Val
  MOD_RES (3)..(3): Arg or Thr
  MOD_RES (4)..(4): Ser, His, Phe, Leu, Pro, Tyr, Gly, Asp, Asn, Glu or Arg
  MOD_RES (5)..(5): Tyr, Leu, Gly, Pro, Ala or Arg
  MOD_RES (6)..(6): Thr, Tyr, Ala, Gly, Ile or Ser
  MOD_RES (7)..(7): Trp, Tyr, Gly, Ser, Ala, Asp, Asn or Thr
  MOD_RES (8)..(8): Leu, Gly, Arg, Tyr, Val or Ser
  MOD_RES (9)..(9): Asp, Leu, Gly, Asn, Ser, Ala or Tyr
  MOD_RES (10)..(10): Ala, Arg, Tyr, Ser, Asp or Gly
  MOD_RES (11)..(11): Arg, Tyr or Ser
  MOD_RES (12)..(12): Ala, Lys, Gly, Tyr, Pro, Arg, Asp or Ser
  MOD_RES (13)..(13): Arg, Met, Phe, Ile or Leu
  MOD_RES (14)..(14): Asp or Ser
  MOD_RES (15)..(15): Tyr, Asp, Phe or Val
CXXXXXXXXXXXXXXWGQ

SEQ ID NO: 1162 - protein, 19 aa, Artificial Sequence
  Description of Artificial Sequence: Synthetic peptide
  MOD_RES (4)..(4): Gly, Asp, Glu, Asn or Ser
  MOD_RES (5)..(5): Tyr, Gly, Glu, Arg, Lys, Ile or Leu
  MOD_RES (6)..(6): Ala, Asp, Asn, Thr, Gly, Tyr, Ser, Phe or Ile
  MOD_RES (7)..(7): Gly, Ser, Ile, Tyr, Val, Thr, Ala, Phe or Asn
  MOD_RES (8)..(8): Gly, Ser, Thr, Tyr, Ala, Asn or Asp
  MOD_RES (9)..(9): Gly, Ser, Asp, Asn, Ala, Ile, Val, Thr, Tyr or Phe
  MOD_RES (10)..(10): Thr, Ser, Tyr, Asn or Gly
  MOD_RES (11)..(11): Tyr, Trp, Asn, Gly, Ser, Asp or Thr
  MOD_RES (12)..(12): Trp, Tyr or Gly
  MOD_RES (13)..(13): Tyr, Ala, Asp, Ser or Gly
  MOD_RES (14)..(14): Phe, Ile, Leu or Met
  MOD_RES (16)..(16): Tyr, Leu, Asp, Phe or Val
  MOD_RES (19)..(19): Arg or Gln
CARXXXXXXXXXXXDXWGX

SEQ ID NO: 1163 - protein, 20 aa, Artificial Sequence
  Description of Artificial Sequence: Synthetic peptide
  MOD_RES (3)..(3): Arg or Thr
  MOD_RES (4)..(4): Gly, Asp, Glu, Val, Lys, Gln or Met
  MOD_RES (5)..(5): Arg, Gly, Ala, Pro, Ser or Asn
  MOD_RES (6)..(6): Pro, Tyr, Ser, Phe, Gly, Ala or Arg
  MOD_RES (7)..(7): Pro, Tyr, Asp, Glu, His, Val or Gln
  MOD_RES (8)..(8): Tyr, Gln, Arg, His, Asp or Gly
  MOD_RES (9)..(9): Gly, Ser, Leu, Val, Ile or Asp
  MOD_RES (10)..(10): Ser, Thr or Ala
  MOD_RES (11)..(11): Gly, Ser, Tyr, Val, Leu, Arg, Asp, Thr, Glu, Ile, Lys, Met or Asn
  MOD_RES (12)..(12): Trp, Tyr, Ser, His, Gly, Asp, Pro, Ile, Glu, Asn or Val
  MOD_RES (13)..(13): Tyr, Gly, Ala, Glu, Asp, Ser, His, Trp or Gln
  MOD_RES (14)..(14): Tyr, Ala, Asp, Ser, Pro, His or Gly
  MOD_RES (15)..(15): Phe, Leu, Ile, Met or Tyr
  MOD_RES (16)..(16): Asp or Phe
  MOD_RES (17)..(17): Tyr, Ile, Asp, Ala, Phe, Val or Ser
  MOD_RES (20)..(20): Gln or Pro
CAXXXXXXXXXXXXXXXWGX

SEQ ID NO: 1164 - protein, 16 aa, Artificial Sequence
  Description of Artificial Sequence: Synthetic peptide
  MOD_RES (1)..(1): Leu or Ile
  MOD_RES (4)..(4): Arg or Ser
  MOD_RES (6)..(6): Val or Ser
  MOD_RES (7)..(7): Pro, Thr, Gln or Ser
  MOD_RES (8)..(8): Ser, Ile or Thr
  MOD_RES (9)..(9): Asn, Ile, Val or Ser
  MOD_RES (10)..(10): Asn or Ser
  MOD_RES (11)..(11): Tyr or Phe
  MOD_RES (12)..(12): Leu, Ala, Met or Val
  MOD_RES (13)..(13): Asn, His, Ser or Tyr
  MOD_RES (15)..(15): Tyr or Val
XTCXAXXXXXXXXWXQ

SEQ ID NO: 1165 - protein, 17 aa, Artificial Sequence
  Description of Artificial Sequence: Synthetic peptide
  MOD_RES (8)..(8): Ala, Asp, Ser or Tyr
  MOD_RES (9)..(9): Ile or Val
  MOD_RES (11)..(11): Thr, Lys, Asn, Arg or Ser
  MOD_RES (14)..(14): Ala, Asp, His, Asn, Pro or Thr
ITCRASQXXSXYLXWYQ

SEQ ID NO: 1166 - protein, 20 aa, Artificial Sequence
  Description of Artificial Sequence: Synthetic peptide
  MOD_RES (1)..(1): Ile or Leu
  MOD_RES (2)..(2): Ser or Thr
  MOD_RES (4)..(4): Thr, Gly or Arg
  MOD_RES (5)..(5): Gly or Ser
  MOD_RES (6)..(7): Ser or Thr
  MOD_RES (8)..(8): Ser or Gly
  MOD_RES (9)..(9): Asp, Ala or Asn
  MOD_RES (10)..(10): Val or Ile
  MOD_RES (11)..(11): Gly or Thr
  MOD_RES (12)..(12): Ala, Ser, Gly or Thr
  MOD_RES (13)..(13): Tyr, Gly or Ser
  MOD_RES (14)..(14): Asn or His
  MOD_RES (15)..(15): Tyr, Asp, Phe or Leu
  MOD_RES (16)..(16): Val, Ala or Pro
  MOD_RES (17)..(17): Ser or Asn
  MOD_RES (19)..(19): Tyr or Val
XXCXXXXXXXXXXXXXXWXQ

SEQ ID NO: 1167 - protein, 21 aa, Artificial Sequence
  Description of Artificial Sequence: Synthetic peptide
  MOD_RES (5)..(5): Ala or Ser
  MOD_RES (7)..(7): Gln, Glu or Lys
  MOD_RES (10)..(10): Ala, Asp, Ser, Tyr, His or Pro
  MOD_RES (11)..(11): Ser or Thr
  MOD_RES (12)..(12): Ser, Tyr, Asp, Gly or Asn
  MOD_RES (14)..(14): Asn or Tyr
  MOD_RES (15)..(15): Ser, Asn or Thr
  MOD_RES (17)..(17): Leu or Met
ISCRXSXSVXXXGXXYXHWYQ

SEQ ID NO: 1168 - protein, 22 aa, Artificial Sequence
  Description of Artificial Sequence: Synthetic peptide
  MOD_RES (4)..(4): Arg or Lys
  MOD_RES (10)..(10): Leu or Val
  MOD_RES (11)..(11): His or Tyr
  MOD_RES (13)..(13): Asn or Asp
  MOD_RES (15)..(15): Lys or Asn
  MOD_RES (16)..(16): Thr or Asn
  MOD_RES (19)..(19): Ala, Asp, Thr, Asn, Pro, Ser, Glu, His, Lys, Gln or Tyr
ISCXSSQSLXXSXGXXYLXWYL

SEQ ID NO: 1169 - protein, 23 aa, Artificial Sequence
  Description of Artificial Sequence: Synthetic peptide
  MOD_RES (9)..(9): Leu or Val
  MOD_RES (11)..(11): Asn or Tyr
  MOD_RES (13)..(13): Gly, Arg or Ser
  MOD_RES (15)..(15): Arg, His, Lys, Asn, Gln or Ser
INCKSSQSXLXSXNXKNYLAWYQ

SEQ ID NO: 1170 - protein, 14 aa, Artificial Sequence
  Description of Artificial Sequence: Synthetic peptide
  MOD_RES (6)..(6): Ser, Tyr or Trp
  MOD_RES (7)..(7): Ser, Tyr, Ala, Asp, Gly, His, Asn, Pro, Arg or Thr
  MOD_RES (8)..(8): Gly, Asp, Glu, Lys, Asn, Arg or Ser
  MOD_RES (9)..(9): Phe, His, Leu, Pro, Ser or Tyr
  MOD_RES (10)..(10): Trp, Phe, His, Leu, Pro, Ser or Tyr
YYCQQXXXXXTFGG

SEQ ID NO: 1171 - protein, 15 aa, Artificial Sequence
  Description of Artificial Sequence: Synthetic peptide
  MOD_RES (6)..(6): Tyr, Trp, Ser or Gly
  MOD_RES (7)..(7): Ser, Tyr, Ala, Asp, Gly, Asn or Thr
  MOD_RES (9)..(9): Asn, Ser, Tyr, Thr, Leu, Ala, Phe, Gly, Met, Arg, Val or Trp
  MOD_RES (11)..(11): Leu, Arg, Trp, Gly, Phe, Val, Tyr, His, Pro or Ser
  MOD_RES (12)..(12): Ala, Thr, Ile or Val
YYCQQXXSXPXXFGG

SEQ ID NO: 1172 - protein, 16 aa, Artificial Sequence
  Description of Artificial Sequence: Synthetic peptide
  MOD_RES (4)..(4): Gln, Pro or Ser
  MOD_RES (5)..(5): Leu, Pro, Ala, Gln, Glu, Ser or Val
  MOD_RES (6)..(6): Tyr or Trp
  MOD_RES (7)..(7): Asp, Ala, Asn or Thr
  MOD_RES (8)..(8): Gly or Ser
  MOD_RES (10)..(10): His, Asn, Pro, Ser, Thr or Tyr
  MOD_RES (11)..(11): Pro, Thr or Ser
  MOD_RES (12)..(12): Leu, Phe, Tyr, Gly, Val or Trp
  MOD_RES (13)..(13): Ala, Met, Thr or Val
YYCXXXXXSXXXXFGG

SEQ ID NO: 1173 - protein, 17 aa, Artificial Sequence
  Description of Artificial Sequence: Synthetic peptide
  MOD_RES (4)..(4): Gln, Ala, Glu or Pro
  MOD_RES (5)..(5): Ser or Ala
  MOD_RES (6)..(6): Tyr or Trp
  MOD_RES (8)..(8): Ser, Asn, Ala, Asp or Tyr
  MOD_RES (10)..(10): Leu, Ser, Ala, Gly, Pro, Arg or Val
  MOD_RES (11)..(11): Asp, Asn, Ser, Ala, Gly, His, Pro, Thr or Tyr
  MOD_RES (12)..(12): Ala, Asp, Gly, His, Pro, Arg, Ile, Leu, Asn, Ser, Thr or Val
  MOD_RES (13)..(13): Val, Tyr, Gly, Asp, Leu, Phe or Trp
YYCXXXDXSXXXXVFGG

SEQ ID NO: 1174 - protein, 14 aa, Artificial Sequence
  Description of Artificial Sequence: Synthetic peptide
  MOD_RES (6)..(6): Ser or Tyr
  MOD_RES (7)..(7): Ser, Tyr, Asp, Gly, His, Asn or Arg
  MOD_RES (8)..(8): Asn, Ser, Thr or Tyr
  MOD_RES (9)..(9): Leu, Phe, Pro, His, Ser, Tyr, Trp or Gln
  MOD_RES (10)..(10): Trp, Phe, His, Leu, Pro, Ser or Tyr
YYCQQXXXXXTFGG

SEQ ID NO: 1175 - protein, 15 aa, Artificial Sequence
  Description of Artificial Sequence: Synthetic peptide
  MOD_RES (6)..(6): Tyr, Trp, His, Pro or Ser
  MOD_RES (7)..(7): Ser, Tyr, Asn, Asp, Lys, Gly or Arg
  MOD_RES (8)..(8): Asn, Ser, Arg, Gly, Asp, Glu, His, Lys or Gln
  MOD_RES (9)..(9): Asn, Ser, Tyr, Thr, Leu, Ala, Phe, His, Gly, Met, Ile, Arg, Val or Trp
  MOD_RES (11)..(11): Leu, Trp, Gly, Phe, Arg, Pro, Val or Ser
  MOD_RES (12)..(12): Ala, Thr, Ile or Val
YYCQQXXXXPXXFGG

SEQ ID NO: 1176 - protein, 16 aa, Artificial Sequence
  Description of Artificial Sequence: Synthetic peptide
  MOD_RES (4)..(4): Gln, Pro or Ser
  MOD_RES (5)..(5): Pro, Gln, Ser, His or Tyr
  MOD_RES (6)..(6): Tyr or Trp
  MOD_RES (7)..(7): Ser, Tyr, Ala, Asp, Gly, Asn or Thr
  MOD_RES (9)..(9): Ser, Asn, Arg, Thr or Trp
  MOD_RES (10)..(10): Pro, His, Asn or Thr
  MOD_RES (11)..(11): Pro, Ser or Thr
  MOD_RES (12)..(12): Leu, Gly, Val, Trp or Phe
  MOD_RES (13)..(13): Ala, Thr, Ile, Val or Met
YYCXXXXSXXXXXFGG

SEQ ID NO: 1177 - protein, 17 aa, Artificial Sequence
  Description of Artificial Sequence: Synthetic peptide
  MOD_RES (4)..(4): Gln, Ala, Glu, Pro or Ser
  MOD_RES (5)..(5): Ser, Pro, Ala, Gln, Phe, Ile, Thr or Val
  MOD_RES (6)..(6): Trp or Tyr
  MOD_RES (7)..(7): Asp or Asn
  MOD_RES (8)..(8): Ser, Asn, Ala, Asp or Tyr
  MOD_RES (9)..(9): Ser or Trp
  MOD_RES (10)..(10): Leu or Pro
  MOD_RES (11)..(11): Pro, Asp, Gly, Thr, Asn or Ser
  MOD_RES (12)..(12): Ala, Asp, Gly, His, Pro, Arg, Ile, Leu, Asn, Ser, Thr or Val
  MOD_RES (13)..(13): Val, Tyr, Asp, His, Gly, Phe, Leu, Pro, Ser or Trp
  MOD_RES (14)..(14): Val, Ala, Met or Thr
YYCXXXXXXXXXXXFGG

SEQ ID NO: 1178 - protein, 38 aa, Artificial Sequence
  Description of Artificial Sequence: Synthetic polypeptide
EEKSRLLEKENRELEKIIAEKEERVSELRHQLQSVGGC

SEQ ID NO: 1179 - protein, 38 aa, Artificial Sequence
  Description of Artificial Sequence: Synthetic polypeptide
TSRLEGLQSENHRLRMKITELDKDLEEVTMQLQDVGGC

SEQ ID NO: 1180 - protein, 119 aa, Artificial Sequence
  Description of Artificial Sequence: Synthetic polypeptide
EVQLLESGGGLVQPGGSLRLSCKASGFTFTSYYMHWVRQAPGKGLEWIGRINPDSGSTKYNEKFKGRATISRDNSKNTLYLQMNSLRAEDTAVYYCARGGRLSWDFDVWGQGTLVTVSS

SEQ ID NO: 1181 - protein, 120 aa, Artificial Sequence
  Description of Artificial Sequence: Synthetic polypeptide
EVQLLESGGGLVQPGGSLRLSCKASGFTFSYYYMPWVRQAPGKGLEWIGRINPDSGGTKYDEKFKGRATISRDNSKNTLYLQMNSLRAEDTAVYYCARDHSYYGSDIDYWGQGTLVTVSS

SEQ ID NO: 1182 - protein, 119 aa, Artificial Sequence
  Description of Artificial Sequence: Synthetic polypeptide
EVQLLESGGGLVQPGGSLRLSCKASGYTFSSYWMHWVRQAPGKGLEWIGRINPNSGGTKYNEKFKGKATISRDNSKNTLYLQMNSLRAEDTAVYYCARKSLYYYAMDYWGQGTLVTVSS

SEQ ID NO: 1183 - protein, 117 aa, Artificial Sequence
  Description of Artificial Sequence: Synthetic polypeptide
EVQLLESGGGLVQPGGSLRLSCKASGYTFTNYSMHWVRQAPGKGLEWIGEINHSGSTYYNPSLKSRVTISRDNSKNTLYLQMNSLRAEDTAVYYCAREDGSNGMDFWGQGTLVTVSS

SEQ ID NO: 1184 - protein, 119 aa, Artificial Sequence
  Description of Artificial Sequence: Synthetic polypeptide
EVQLLESGGGLVQPGGSLRLSCKASGFTFSSYYMSWVRQAPGKGLEWIGRINPGSGGTKYNQKFKGRATISRDNSKNTLYLQMNSLRAEDTAVYYCARKGHYYYGLDYWGQGTLVTVSS

SEQ ID NO: 1185 - protein, 114 aa, Artificial Sequence
  Description of Artificial Sequence: Synthetic polypeptide
EVQLLESGGSLVQPGGSLRLSCKASGYTFSSYYMHWVRQAPGKGLEWIGRINPSSGSTKYNEKFKGRATISRDNSKNTLYLQMNSLRAEDTAVYYCARYNMAYWGQGTLVTVSS

SEQ ID NO: 1186 - protein, 119 aa, Artificial Sequence
  Description of Artificial Sequence: Synthetic polypeptide
EVQLLESGGGLVQPGGSLRLSCKASGFTFSAYYMHWVRQAPGKGLEWVGRISPSGGGTYYADSVKGRFTISRDNSKNTLYLQMNSLRAEDTAVYYCARKSSSYYGLDYWGQGTLVTVSS

SEQ ID NO: 1187 - protein, 122 aa, Artificial Sequence
  Description of Artificial Sequence: Synthetic polypeptide
EVQLLESGGGLVQPGGSLRLSCKASGYTFSSYYMHWVRQAPGKGLEWVGRISPSGGGTYYADSVKGRFTISRDNSKNTLYLQMNSLRAEDTAVYYCARGKGYYSYYYALDYWGQGTLVTVSS

SEQ ID NO: 1188 - protein, 121 aa, Artificial Sequence
  Description of Artificial Sequence: Synthetic polypeptide
EVQLLESGGGLVQPGGSLRLSCKASGYTFSSYWMHWVRQAPGKGLEWIGRIDPYNGGTKYNEKFKGKATISRDNSKNTLYLQMNSLRAEDTAVYYCARYGYYLGSYAMDYWGQGTLVTVSS

SEQ ID NO: 1189 - protein, 118 aa, Artificial Sequence
  Description of Artificial Sequence: Synthetic polypeptide
EVQLLESGGGLVQPGGSLRLSCKASGFTFTSYSMHWVRQAPGKGLEWIGRINPNSGSTKYAEKFKGRATISRDNSKNTLYLQMNSLRAEDTAVYYCARGDGYGHFDYWGQGTLVTVSS

SEQ ID NO: 1190 - protein, 123 aa, Artificial Sequence
  Description of Artificial Sequence: Synthetic polypeptide
EVQLLESGGGLVQPGGSLRLSCKASGYTFSSYAMHWVRQAPGKGLEWIGWINPSSGSTKYNEKFKGRATISRDNSKNTLYLQMNSLRAEDTAVYYCARGGGSGSYGSSSMDDWGQGTLVTVSS

SEQ ID NO: 1191 - protein, 118 aa, Artificial Sequence
  Description of Artificial Sequence: Synthetic polypeptide
EVQLLESGGGLVQPGGSLRLSCKASGFTFSSYSMSWVRQAPGKGLEWIGAISHSGSTNYNPSLKSRVTISRDNSKNTLYLQMNSLRAEDTAVYYCARGRSGSWGLDYWGQGTLVTVSS

SEQ ID NO: 1192 - protein, 117 aa, Artificial Sequence
  Description of Artificial Sequence: Synthetic polypeptide
EVQLLESGGGLVQPGGSLRLSCKASGYTFTSYAMHWVRQAPGKGLEWIGVINYSGSTYYNPSLKSRVTISRDNSKNTLYLQMNSLRAEDTAVYYCARDGGDYYLDYWGQGTLVTVSS

SEQ ID NO: 1193 - protein, 122 aa, Artificial Sequence
  Description of Artificial Sequence: Synthetic polypeptide
EVQLLESGGGLVQPGGSLRLSCKASGYTFTSYYMHWVRQAPGKGLEWVGRINPGGGSTYYADSFKGRFTISRDNSKNTLYLQMNSLRAEDTAVYYCARGRGYSGYYYALDYWGQGTLVTVSS

SEQ ID NO: 1194 - protein, 122 aa, Artificial Sequence
  Description of Artificial Sequence: Synthetic polypeptide
EVQLLESGGGLVQPGGSLRLSCKASGFTFSSYAMSWVRQAPGKGLEWISLIYHSGSTYYNPSLKSRVTISRDNSKNTLYLQMNSLRAEDTAVYYCARVGYYGGSSYYDFDYWGQGTLVTVSS

SEQ ID NO: 1195 - protein, 121 aa, Artificial Sequence
  Description of Artificial Sequence: Synthetic polypeptide
EVQLLESGGGLVQPGGSLRLSCKASGFTFSYYWMHWVRQAPGKGLEWIGAITYSGSTYYNPSLKSRVTISRDNSKNTLYLQMNSLRAEDTAVYYCARDIYNYSSYYGFDDWGQGTLVTVSS

SEQ ID NO: 1196 - protein, 122 aa, Artificial Sequence
  Description of Artificial Sequence: Synthetic polypeptide
EVQLLESGGGLVQPGGSLRLSCKASGFTFSSYWMHWVRQAPGKGLEWIGRINPSSGGTKYNEKFKGKATISRDNSKNTLYLQMNSLRAEDTAVYYCARGKGYYGYYYAIDYWGRGTLVTVSS

SEQ ID NO: 1197 - protein, 119 aa, Artificial Sequence
  Description of Artificial Sequence: Synthetic polypeptide
EVQLLESGGGLVQPGGSLRLSCKASGYTFSSYWMNWVRQAPGKGLEWVGRISPSGYTTDYAASVKGRFTISRDNSKNTLYLQMNSLRAEDTAVYYCARKSHSYYAIDYWGQGTLVTVSS

SEQ ID NO: 1198 - protein, 123 aa, Artificial Sequence
  Description of Artificial Sequence: Synthetic polypeptide
EVQLLESGGGLVQPGGSLRLSCKASGFTFTYYGMNWVRQAPGKGLEWVGRISPGGGGTYYADSFKGRFTISRDNSKNTLYLQMNSLRAEDTAVYYCARGGSYRVAGSYPFDYWGQGTLVTVSS

SEQ ID NO: 1199 - protein, 118 aa, Artificial Sequence
  Description of Artificial Sequence: Synthetic polypeptide
EVQLLESGGGLVQPGGSLRLSCKASGYTFTDYWIHWVRQAPGKGLEWIGRINPGSGSTKYDEKFKGRATISRDNSKNTLYLQMNSLRAEDTAVYYCARKGHYYYLDYWGQGTLVTVSS

SEQ ID NO: 1200 - protein, 114 aa, Artificial Sequence
  Description of Artificial Sequence: Synthetic polypeptide
EVQLLESGGGLVQPGGSLRLSCKASGFTFTSYSMHWVRQAPGKGLEWVGRISPSGGTTYYADSFKGRFTISRDNSKNTLYLQMNSLRAEDTAVYYCARSELDYWGQGTLVTVSS

SEQ ID NO: 1201 - protein, 119 aa, Artificial Sequence
  Description of Artificial Sequence: Synthetic polypeptide
EVQLLESGGGLVQPGGSLRLSCKASGYTFSSYYMSWVRQAPGKGLEWIGRINPGSGSTKYAEKFKGRATISRDNSKNTLYLQMNSLRAEDTAVYYCARGGYYYGRMDYWGQGTLVTVSS

SEQ ID NO: 1202 - protein, 119 aa, Artificial Sequence
  Description of Artificial Sequence: Synthetic polypeptide
EVQLLESGGGLVQPGGSLRLSCKASGFTFSSYWMSWVRQAPGKGLEWVGRISPSGGNTYYADSVKGRFTISRDNSKNTLYLQMNSLRAEDTAVYYCARKSLSYYYLDDWGQGTLVTVSS

SEQ ID NO: 1203 - protein, 122 aa, Artificial Sequence
  Description of Artificial Sequence: Synthetic polypeptide
EVQLLESGGGLVQPGGSLRLSCKASGYTFTSYYMHWVRQAPGKGLEWVGRISPSGGGTYYANSFKGRFTISRDNSKNTLYLQMNSLRAEDTAVYYCARGYGGYGYYYGIDDWGQGTLVTVSS

SEQ ID NO: 1204 - protein, 119 aa, Artificial Sequence
  Description of Artificial Sequence: Synthetic polypeptide
EVQLLESGGGLVQPGGSLRLSCKASGYTFTSYWMNWVRQAPGKGLEWVGRISPGGGSTYYADSFKGRFTISRDNSKNTLYLQMNSLRAEDTAVYYCARKYYSYYGLDYWGQGTLVTVSS

SEQ ID NO: 1205 - protein, 119 aa, Artificial Sequence
  Description of Artificial Sequence: Synthetic polypeptide
EVQLLESGGGLVQPGGSLRLSCKASGFTFSYYYMHWVRQAPGKGLEWIGRINPDSGGTKYDQKFKGRATISRDNSKNTLYLQMNSLRAEDTAVYYCARKPLYYYGLDYWGQGTLVTVSS

SEQ ID NO: 1206 - protein, 119 aa, Artificial Sequence
  Description of Artificial Sequence: Synthetic polypeptide
EVQLLESGGGLVQPGGSLRLSCKASGFTFSSYWMNWVRQAPGKGLEWVGRISPNGSGTYYAASVKGRFTISRDNSKNTLYLQMNSLRAEDTAVYYCARKYLSYYGLDYWGQGTLVTVSS

SEQ ID NO: 1207 - protein, 117 aa, Artificial Sequence
  Description of Artificial Sequence: Synthetic polypeptide
EVQLLESGGGLVQPGGSLRLSCKASGYTFTDYSMNWVRQAPGKGLEWVGRINPGGGSTYYADSVKGRFTISRDNSKNTLYLQMNSLRAEDTAVYYCARHDGDYLDYWGQGTLVTVSS

SEQ ID NO: 1208 - protein, 119 aa, Artificial Sequence
  Description of Artificial Sequence: Synthetic polypeptide
EVQLLESGGGLVQPGGSLRLSCKASGFTFSSYWMSWVRQAPGKGLEWVGRISPGGGSTYYADSFKGRFTISRDNSKNTLYLQMNSLRAEDTAVYYCARRGGGYYALAYWGQGTLVTVSS

SEQ ID NO: 1209 - protein, 118 aa, Artificial Sequence
  Description of Artificial Sequence: Synthetic polypeptide
EVQLLESGGGLVQPGGSLRLSCKASGYTFSSYGMYWVRQAPGKGLEWIGWIDPGSGGTKYNEKFKGKATISRDNSKNTLYLQMNSLRAEDTAVYYCARERYGYYFDYWGQGTLVTVSS

SEQ ID NO: 1210 - protein, 119 aa, Artificial Sequence
  Description of Artificial Sequence: Synthetic polypeptide
EVQLLESGGGLVQPGGSLRLSCKASGFTFTSYWMNWVRQAPGKGLEWVGRISPGGGTTYYADSFKGRFTISRDNSKNTLYLQMNSLRVEDTAVYYCARKSFYYYGMDYWGQGTLVTVSS

SEQ ID NO: 1211 - protein, 119 aa, Artificial Sequence
  Description of Artificial Sequence: Synthetic polypeptide
EVQLLESGGGLVQPGGSLRLSCKASGYTFTGYWINWVRQAPGKGLEWVGRISPGGGGTYYANSVKGRFTISRDNSKNTLYLQMNSLRAEDTAVYYCARKYLYYYALDYWGQGTLVTVSS

SEQ ID NO: 1212 - protein, 119 aa, Artificial Sequence
  Description of Artificial Sequence: Synthetic polypeptide
EVQLLESGGGLVQPGGSLRLSCKASGYTFTSYWMNWVRQAPGKGLEWVGRINPSGGGTYYADSVKGRFTISRDNSKNTLYLQMNSLRAEDTAVYYCARKGFSYYALDYWGQGTLVTVSS

SEQ ID NO: 1213 - protein, 119 aa, Artificial Sequence
  Description of Artificial Sequence: Synthetic polypeptide
EVQLLESGGGLVQPGGSLRLSCKASGYTFTSYWINWVRQAPGKGLEWVGRISPGGGGTYYADSVKGRFTISRDNSKNTLYLQMNSLRAEDTAVYYCARKGHSYYGMDYWGQGTLVTVSS

SEQ ID NO: 1214 - protein, 120 aa, Artificial Sequence
  Description of Artificial Sequence: Synthetic polypeptide
EVQLLESGGGLVQPGGSLRLSCKASGYTFTSYSMHWVRQAPGKGLEWIGWINPDSGGTKYDEKFKGRATISRDNSKNTLYLQMNSLRAEDTAVYYCARAVLRGGYYMDYWGQGTLVTVSS

SEQ ID NO: 1215 - protein, 119 aa, Artificial Sequence
  Description of Artificial Sequence: Synthetic polypeptide
EVQLLESGGGLVQPGGSLRLSCKASGYTFTGYWINWVRQAPGKGLEWVGRISPGGGSTYYADSVKGRFTISRDNSKNTLYLQMNSLRAEDTAVYYCARKGLYYYGLDYWGQGTLVTVSS

SEQ ID NO: 1216 - protein, 119 aa, Artificial Sequence
  Description of Artificial Sequence: Synthetic polypeptide
EVQLLESGGGLVQPGGSLRLSCKASGFTFSSYWMNWVRQAPGKGLEWVGRISPGGGTTYYADSVKGRFTISRDNSKNTLYLQMNSLRAEDTAVYYCARKGHYYYAMDYWGQGTLVTVSS

SEQ ID NO: 1217 - protein, 124 aa, Artificial Sequence
  Description of Artificial Sequence: Synthetic polypeptide
EVQLLESGGGLVQPGGSLRLSCKASGFTFSSYWMHWVRQAPGKGLEWIGRINPNSGGTKYNEKFKGKATLTISRDNSKNTLYLQMNSLRAEDTAVYYCARGRYYDGYYYALDYWGQGTLVTVSS

SEQ ID NO: 1218 - protein, 122 aa, Artificial Sequence
  Description of Artificial Sequence: Synthetic polypeptide
EVQLLESGGGLVQPGGSLRLSCKASGYTFSSYAMHWVRQAPGKGLEWVGRISPGGGNTYYADSVKGRFTISRDNSKNTLYLQMNSLRAEDTAVYYCARGKGYYNSYYAMDHWGQGTLVTVSS

SEQ ID NO: 1219 - protein, 120 aa, Artificial Sequence
  Description of Artificial Sequence: Synthetic polypeptide
EVQLLESGGGLVQPGGSLRLSCKASGYTFSSYGMSWVRQAPGKGLEWIGYITYSGSTSYNPDLKNRRTIISRDNSKNTLYLQMNSLRAEDTAVYYCARQLVGGGYNMDYWGQGTLVTVSS

SEQ ID NO: 1220 - protein, 119 aa, Artificial Sequence
  Description of Artificial Sequence: Synthetic polypeptide
EVQLLESGGGLVQPGGSLRLSCKASGFTFTAYWMSWVRQAPGKGLEWVGRISPSGGGTYYADSFKGRFTISRDNSKNTLYLQMNSLRAEDTAVYYCARKHSSYYGLDDWGQGTLVTVSS

SEQ ID NO: 1221 - protein, 119 aa, Artificial Sequence
  Description of Artificial Sequence: Synthetic polypeptide
EVQLLESGGGLVQPGGSLRLSCKASGYTFTGYWINWVRQAPGKGLEWVGRISPSGSGTYYADSLKGRFTISRDNSKNTLYLQMNSLRAEDTAVYYCARKGHYYYGFDYWGQGTLVTVSS

SEQ ID NO: 1222 - protein, 121 aa, Artificial Sequence
  Description of Artificial Sequence: Synthetic polypeptide
EVQLLESGGGLVQPGGSLRLSCKASGYTFSSYYMHWVRQAPGKGLEWIGWINPGSGSTKYAEKFKGRATISRDNSKNTLYLQMNSLRAEDTAVYYCARHGIYYDYSRIDYWGQGTLVTVSS

SEQ ID NO: 1223 - protein, 119 aa, Artificial Sequence
  Description of Artificial Sequence: Synthetic polypeptide
EVQLLESGGGLVQPGGSLRLSCKASGYTFTGYWINWVRQAPGKGLEWVGRISPSGGNTYYADSVKGRFTISRDNSKNTLYLQMNSLRAEDTAVYYCARKYLYYYAIDYWGQGTLVTVSS

SEQ ID NO: 1224 - protein, 109 aa, Artificial Sequence
  Description of Artificial Sequence: Synthetic polypeptide
DIQMTQSPSSLSASVGDRVTITCRASQDISRYLAWYQQKPGKAPKLLIYAASSLQSGVPSRFSGSGSGTDFTLTISSLQPEDFATYYCAAYDYSLGGYVFGDGTKVEIK

SEQ ID NO: 1225 - protein, 109 aa, Artificial Sequence
  Description of Artificial Sequence: Synthetic polypeptide
DIQMTQSPSSLSASVGDRVTITCRASQAISKYLHWYQQKPGKAPKLLIYAASSLQSGVPSRFSGSGSGTDFTLTISSLQPEDFATYYCQSWDSSVYDYVFGGGTKVEIK

SEQ ID NO: 1226 - protein, 108 aa, Artificial Sequence
  Description of Artificial Sequence: Synthetic polypeptide
DIQMTQSPSSLSASVGDRVTITCRASQYVSNYLNWYQQKPGKAPKLLIYAASSLQSGVPSRFSGSGSGTDFTLTISSLQPEDFATYYCQSYDSSTSLAYGGGTKVEIK

SEQ ID NO: 1227 - protein, 109 aa, Artificial Sequence
  Description of Artificial Sequence: Synthetic polypeptide
DIQMTQSPSSLSASVGDRVTITCRASQAVSSYLNWYQQKPGKAPKLLIYAASSLQSGVPSRFSGSGSGTDFTLTISSLQPEDFATYYCQSWDNSLADYVFGGGTKVEIK

SEQ ID NO: 1228 - protein, 108 aa, Artificial Sequence
  Description of Artificial Sequence: Synthetic polypeptide
DIQMTQSPSSLSAPVGDRVTITCRASQYVSTYLNWYQQKPGKAPKLLIYAASSLQSGVPSRFSGSGSGTDFTLTISSLQPEDFATYYCQSYASSTTLAFGGGTKVEIK

SEQ ID NO: 1229 - protein, 109 aa, Artificial Sequence
  Description of Artificial Sequence: Synthetic polypeptide
DIQMTQSPSSLSASVGDRVTITCRASQAVSTYLNWYQQKPGKAPKLLIYAASSLQSGVPSRFSGSGSGTDFTLTISSLQPEDFATYYCAAWDNSAPAVVFGGGTKVEIK

SEQ ID NO: 1230 - protein, 109 aa, Artificial Sequence
  Description of Artificial Sequence: Synthetic polypeptide
DIQMTQSPSSLSASVGDRVTITCRASQAVSKYLNWYQQKPGKAPKLLIYAASSLQSGVPSRFSGSGSGTDFTLTISSLQPEDFATYYCQSWDNSVPIVVFGGGTKVEIK

SEQ ID NO: 1231 - protein, 108 aa, Artificial Sequence
  Description of Artificial Sequence: Synthetic polypeptide
DIQMTQSPSSLSASVGDRVTITCRASQYVSKYLNWYQQKPGKAPKLLIYAASSLQSGVPSRFSGSGSGTDFTLTISSLQPEDFAIYYCQSYDSSTTLVFGGGTKVEIK

SEQ ID NO: 1232 - protein, 109 aa, Artificial Sequence
  Description of Artificial Sequence: Synthetic polypeptide
DIQMTQSPSSLSASVGDRVTITCRASQDVSKYLAWYQQKPGKAPKLLIYAASSLQSGVPSRFSGSGSGTDFTLTISSLQPEDFATYYCQVYDSSPNAYVFGGGTKVEIK

SEQ ID NO: 1233 - protein, 109 aa, Artificial Sequence
  Description of Artificial Sequence: Synthetic polypeptide
DIQMTQSPSSLSASVGDRVTITCRASQYVSRYLDWYQQKPGKAPKLLIYAASSLQSGVPSRFSGSGSGTDFTLTISSLQPEDFATYYCQSWDSSGNHDVFGGGTKVEIK

SEQ ID NO: 1234 - protein, 109 aa, Artificial Sequence
  Description of Artificial Sequence: Synthetic polypeptide
DIQMTQSPSSLSASVGDRVTITCRASQYVSNYLDWYQQKPGKAPKLLIYAASSLQSGVPSRFSGSGSGTDFTLTISSLQPEDFATYYCEAYDSSLGHGVFGGGTKVEIK

SEQ ID NO: 1235 - protein, 109 aa, Artificial Sequence
  Description of Artificial Sequence: Synthetic polypeptide
DIQMTQSPSSLSASVGDRVTITCRASQDVSKYLTWYQQKPGKAPKLLIYAASSLQSGVPSRFSGSGSGTDFTLTISSLQPEDFATYYCQSWDNSASRSVFGGGTKVEIK

SEQ ID NO: 1236 - protein, 109 aa, Artificial Sequence
  Description of Artificial Sequence: Synthetic polypeptide
DIQMTQSPSSLSASVGDRVTITCRASQAISSYLDWYQQKPGKAPKLLIYAASSLQSGVPSRFSGSGSGTDFTLTISSLQPEDFATYYCQSYDSSASSFVFGGGTKVEIK

SEQ ID NO: 1237 - protein, 109 aa, Artificial Sequence
  Description of Artificial Sequence: Synthetic polypeptide
DIQMTQSPSSLSASVGDRVAITCRASQSVSRYLNWYQQKPGKAPKLLIYAASSLQSGVPSRFSGSGSGTDFTLTISSLQPEDFATYYCQSYDSSPSTVVFGGGTKVEIK

SEQ ID NO: 1238 - protein, 106 aa, Artificial Sequence
  Description of Artificial Sequence: Synthetic polypeptide
DIQMTQSPSSLSASVGDRVTITCRASQDVSTYLSWYQQKPGKAPKLLIYAASSLQSGVPSRFSGSGSGTDFTLTISSLQPEDFATYYCQQWPDPPTFGGGTKVEIK

SEQ ID NO: 1239 - protein, 106 aa, Artificial Sequence; identical to SEQ ID NO: 821
  Description of Artificial Sequence: Synthetic polypeptide

SEQ ID NO: 1240 - protein, 109 aa, Artificial Sequence
  Description of Artificial Sequence: Synthetic polypeptide
DIQMTQSPSSLSASVGDRVTITCRASQAVSTYLAWYQQKPGKAPKLLIYAASSLQSGVPSRFSGSGSGTDFTLTISSLQPEDFATYYCQSWDNSSTRVVFGGGTKVEIK

SEQ ID NO: 1241 - protein, 108 aa, Artificial Sequence
  Description of Artificial Sequence: Synthetic polypeptide
DIQMTQSPSSLSASVGDRVTITCRASQSVSRYLNWYQQKPGKAPKLLIYAASSLQSGVPSRFSGSGSGTDFTLTISSLQPEDFATYYCQSYASSTTVAFGGGTKVEIK

SEQ ID NO: 1242 - protein, 109 aa, Artificial Sequence
  Description of Artificial Sequence: Synthetic polypeptide
DIQMTQSPSSLSASVGDRVTITCRASQSISTYLTWYQQKPGKAPKLLIYAASSLQSGVPSRFSGSGSGTDFTLTISSLQPEDFATYYCQAWDSSSNHWVFGGGTKVEIK

SEQ ID NO: 1243 - protein, 109 aa, Artificial Sequence
  Description of Artificial Sequence: Synthetic polypeptide
DIQMTQSPSSLSASVGDRVTITCRASQAVSRYLNWYQQKPGKAPKLLIYAASSLQSGVPSRFSGSGSGTDFTLTISSLQPEDFATYYCQSYDNSGPNVVFGGGTKVEIK

SEQ ID NO: 1244 - protein, 106 aa, Artificial Sequence
  Description of Artificial Sequence: Synthetic polypeptide
DIQMTQSPSSLSASVGDRVTITCRASQAVSSYLNWYQQKPGKAPKLLIYAASSLQSGVPSRFSGSGSGTDFTLTISSLQPEDFATYYCQQWPGHWTFGGGTKVEIK

SEQ ID NO: 1245 - protein, 108 aa, Artificial Sequence
  Description of Artificial Sequence: Synthetic polypeptide
DIQMTQSPSSLSASVGDRVTITCRASQAVSRYLAWYQQKPGKAPKLLIYAASSLQSGVPSRFSGSGSGTDFTLTISSLQPEDFATYYCQSYASSPSLVFGGGTKVEIK

SEQ ID NO: 1246 - protein, 108 aa, Artificial Sequence
  Description of Artificial Sequence: Synthetic polypeptide
DIQMTQSPSSLSASVGDRVTITCRASQAVSKYLNWYQQKPGKAPKLLIYAASSLQSGVPSRFSGSGSGTDFTLTISSLQPEDFATYYCQSYDSSSPVVFGGGTKVEIK

SEQ ID NO: 1247 - protein, 109 aa, Artificial Sequence
  Description of Artificial Sequence: Synthetic polypeptide
DIQMTQSPSSLSASVGDRVTITCRASQAVSTYLNWYQQKPGKAPKLLIYAASSLQSGVPSRFSGSGSGTDFTLTISSLQPEDFATYYCQSWGSSGTTVVFGGGTKVEIK

SEQ ID NO: 1248 - protein, 109 aa, Artificial Sequence
  Description of Artificial Sequence: Synthetic polypeptide
DIQMTQSPSSLSASVGDRVTITCRASQAVSRYLNWYQQKPGKAPKLLIYAASSLQSGVPSRFSGSGSGTDFTLTISSLQPEDFATYYCQAYDYSLGGYVFGGGTKVEIK

SEQ ID NO: 1249 - protein, 109 aa, Artificial Sequence
  Description of Artificial Sequence: Synthetic polypeptide
DIQMTQSPSSLSASVGDRVTITCRASQYVSSYLAWYQQKPGKAPKLLIYAASSLQSGVPSRFSGSGSGTDFTLTISSLQPEDFATYYCQSWDNSSSGVVFGGGTKVEIK

SEQ ID NO: 1250 - protein, 109 aa, Artificial Sequence
  Description of Artificial Sequence: Synthetic polypeptide
DIQMTQSPSSLSASVGDRVTITCRASQYVSSYLNWYQQKPGKAPKLLIYAASSLQSGVPSRFSGSGSGTDFTLTISSLQPEDFATYYCQSWDSSSYGVVFGGGTKVEIK

SEQ ID NO: 1251 - protein, 108 aa, Artificial Sequence
  Description of Artificial Sequence: Synthetic polypeptide
DIQMTQSPSSLSASVGDRVTITCRASQSVSRYLDWYQQKPGKAPKLLIYAASSLQSGVPSRFSGSGSGTDFTLTISSLQPEDFATYYCQSYDSSTSLVFGGGTKVEIK

SEQ ID NO: 1252 - protein, 108 aa, Artificial Sequence
  Description of Artificial Sequence: Synthetic polypeptide
DIQMTQSPSSLSASVGDRVTITCRASQYVSRYLDWYQQKPGKAPKLLIYAASSLQSGVPSRFSGSGSGTDFTLTISSLQPEDFATYYCSSYASSPSYAFGGGTKVEIK

SEQ ID NO: 1253 - protein, 109 aa, Artificial Sequence
  Description of Artificial Sequence: Synthetic polypeptide
DIQMTQSPSSLSASVGDRVTITCRASQAISTYLNWYQQKPGKAPKLLIYAASSLQSGVPSRFSGSGSGTDFTLTISSLQPEDFATYYCQSWDSSGAHVVFGGGTKVEIK

SEQ ID NO: 1254 - protein, 108 aa, Artificial Sequence; identical to SEQ ID NO: 813
  Description of Artificial Sequence: Synthetic polypeptide

SEQ ID NO: 1255 - protein, 108 aa, Artificial Sequence
  Description of Artificial Sequence: Synthetic polypeptide
EIVLTQSPATLSLSPGERATITCRASQSVSSYLNWYQQKPGQAPRLLIYDASNRATGIPARFSGSGSGTDFTLTISSLEPEDFAVYYCQSWDSSSTVTFGGGTKVEIK

SEQ ID NO: 1256 - protein, 109 aa, Artificial Sequence
  Description of Artificial Sequence: Synthetic polypeptide
EIVLTQSPATLSLSPGERATITCRASQSVGNYLTWYQQKPGQAPRLLIYDASNRATGIPARFSGSGSGTDFTLTISSLEPEDFAVYYCQSWDNSSANVVFGGGTKVEIK

SEQ ID NO: 1257 - protein, 109 aa, Artificial Sequence
  Description of Artificial Sequence: Synthetic polypeptide
EIVLTQSPATLSLSPGERATITCRASQSVGNYLTWYQQKPGQAPRLLIYDASNRATGIPARFSGSGSGTDFTLTISSLEPEDFAVYYCQSWDNSRAVVVFGGGTKVEIK

SEQ ID NO: 1258 - protein, 108 aa, Artificial Sequence
  Description of Artificial Sequence: Synthetic polypeptide
EIVLTQSPATLSLSPGERATITCRASQDVGSYLDWYQQKPGQAPRLLIYDASNRATGIPARFSGSGSGTDFTLTISSLEPEDFAVYYCQSWDSSSPVVFGGGTKVEIK

SEQ ID NO: 1259 - protein, 106 aa, Artificial Sequence
  Description of Artificial Sequence: Synthetic polypeptide
EIVLTQSPATLSLSPGERATITCRASQYIGSYLDWYQQKPGQAPRLLIYDASNRATGIPARFSGSGSGTDFTLTISSLEPEDFAVYYCQQSGEPWTFGGGTKVEIK

SEQ ID NO: 1260 - protein, 109 aa, Artificial Sequence
  Description of Artificial Sequence: Synthetic polypeptide
EIVLTQSPATLSLSPGERATITCRASQAVSTYLTWYQQKPGQAPRLLIYDASNRATGIPARFSGSGSGTDFTLTISSLEPEDFAVYYCASWDASSSAGVFGGGTKVEIK

SEQ ID NO: 1261 - protein, 109 aa, Artificial Sequence
  Description of Artificial Sequence: Synthetic polypeptide
EIVLTQSPATLSLSPGERATITCRASQAVSSYLNWYQQKPGQAPRLLIYDASNRATGIPARFSGSGSGTDFTLTISSLEPEDFAVYYCQSYDYSSSGGVFGGGTKVEIK

SEQ ID NO: 1262 - protein, 106 aa, Artificial Sequence
  Description of Artificial Sequence: Synthetic polypeptide
EIMLTQSPATLSLSPGERATITCRASQSVSTYLNWYQQKPGQAPRLLIYDASNRATGIPARFSGSGSGTDFTLTISSLEPEDFAVYYCQQYGESLTFGGGTKVEIK

SEQ ID NO: 1263 - protein, 109 aa, Artificial Sequence
  Description of Artificial Sequence: Synthetic polypeptide
EIVLTQSPATLSLSPGERATITCRASQAVSTYLDWYQQKPGQAPRLLIYDASNRATGIPARFSGSGSGTDFTLTISSLEPEDFAVYYCQSWDSSSTNVVFGGGTKVEIK

SEQ ID NO: 1264 - protein, 108 aa, Artificial Sequence
  Description of Artificial Sequence: Synthetic polypeptide
EIVLTQSPATLSLFPGERATITCRASQDVGTYLAWYQQKPGQAPRLLIYDASNRATGIPARFSGSGSGTDFTLTISSLEPEDFAVYYCSSYDSSNSGVFGGGTKVEIK

SEQ ID NO: 1265 - protein, 109 aa, Artificial Sequence
  Description of Artificial Sequence: Synthetic polypeptide
EIVLTQSPATLSLSPGERATITCRASQAVGNYLNWYQQKPGQAPRLLIYDASNRATGIPARFSGSGSGTDFTLTISSLEPEDFAVYYCQSWDSSSADVVFGGGTKVEIK

SEQ ID NO: 1266 - protein, 108 aa, Artificial Sequence
  Description of Artificial Sequence: Synthetic polypeptide
EIVLTQSPATLSLSPGERATITCRASQAVGSYLDWYQQKPGQAPRLLIYDASNRATGIPARFSGSGSGTDFTLTISSLEPEDFAVYYCQSYTSSTSVVFGGGTKVEIK

SEQ ID NO: 1267 - protein, 109 aa, Artificial Sequence
  Description of Artificial Sequence: Synthetic polypeptide
ETVLTQSPATLSLSPGERATITCRASQDVGSYLNWYQQKPGQAPRLLIYDASNRATGIPARFSGSGSGTDFTLTISSLEPEDFAVYYCQSWDNSPSDFVFGGGTKVEIK

SEQ ID NO: 1268 - protein, 109 aa, Artificial Sequence
  Description of Artificial Sequence: Synthetic polypeptide
EIVLTQSPATLSLSPGERATITCRASQSVSNYLNWYQQKPGQAPRLLIYDASNRATGIPARFSGSGSGTDFTLTISSLEPEDFAVYYCQSYDASLGDGVFGGGTKVEIK

SEQ ID NO: 1269 - protein, 119 aa, Artificial Sequence
  Description of Artificial Sequence: Synthetic polypeptide
EVQLLESGGGLVQPGGSLRLSCKASGYTFTSYWMSWVRQAPGKGLEWVGRISPGGGGTYYADSVKGRFTISRDNSKNTLYLQMNSLRAEDTAVYYCARKYPYYYGFDYWGQGTLVTVSS

SEQ ID NO: 1270 - protein, 122 aa, Artificial Sequence
  Description of Artificial Sequence: Synthetic polypeptide
EVQLLESGGGLVQPGGSLRLSCKASGYTFTSYSMRWVRQAPGKGLEWIGVITHSGSTYYNPSLKSRVTISRDNSKNTLYLQMNSLRAEDTAVYYCARVGYYGGSSDWSLDVWGQGTLVTVSS

SEQ ID NO: 1271 - protein, 118 aa, Artificial Sequence
  Description of Artificial Sequence: Synthetic polypeptide
EVQLLESGGGLVQPGGSLRLSCKASGYTFTDYGMNWVRQAPGKGLEWIGDIYYSGSTYYNPSLKSRVTISRDNSKNTLYLQMNSLRAEDTAVYYCARGGYYYYALDYWGQGTLVTVSS

SEQ ID NO: 1272 - protein, 119 aa, Artificial Sequence
  Description of Artificial Sequence: Synthetic polypeptide
EVQLLESGGGLVQPGGSLRLSCKASGYTFSAYSMHWVRQAPGKGLEWIGYITYSGSTDYNPALKSRRTIISRDNSKNTLYLQMNSLRAEDTAVYYCARYGYGGYYMDVWGQGTLVTVSS

SEQ ID NO: 1273 - protein, 119 aa, Artificial Sequence
  Description of Artificial Sequence: Synthetic polypeptide
EVQLLESGGGLVQPGGSLRLSCKASGYTFTNYWINWVRQAPGKGLEWVGRISPGGGNTYYADSVKGRFTISRDNSKNTLYLQMNSLRAEDTAVYYCARKSFYYYGFDDWGQGTLVTVSS

SEQ ID NO: 1274 - protein, 119 aa, Artificial Sequence
  Description of Artificial Sequence: Synthetic polypeptide
EVQLLESGGGLVQPGGSLRLSCKASGYTFSSYGMHWVRQAPGKGLEWIGYINYSGSTSYNPSLKKGRFTISRDNSKNTLYLQMNSLRAEDTAVYYCARGGYGSYGFDFWGQGTLVTVSS

SEQ ID NO: 1275 - protein, 118 aa, Artificial Sequence
  Description of Artificial Sequence: Synthetic polypeptide
EVQLLESGGGLVQPGGSLRLSCKASGFTFSSYYMSWVRQAPGKGLEWIGDINYSGSTNYNPSLKSRVTISRDNSKNTLYLQMNSLRAEDTAVYYCARGHSFYWAFDVWGQGTLVTVSS

SEQ ID NO: 1276 - protein, 116 aa, Artificial Sequence
  Description of Artificial Sequence: Synthetic polypeptide
EVQLLESGGGLVQPGGSLRLSCKASGFTFSAYSMSWVRQAPGKGLEWIGDITYSGSTYYNPSLKSRVTISRDNSKNTLYLQMNSLRAEDTAVYYCARVRGDVLDYWGQGTLVTVSS

SEQ ID NO: 1277 - protein, 116 aa, Artificial Sequence
  Description of Artificial Sequence: Synthetic polypeptide
EVQLLESGGGLVQPGGSLRLSCKASGYTFSYYSMHWVRQAPGKGLEWIGEINYSGSTYYNPSLKSRVTISRDNSKNTLYLQMNSLRAEDTAVYYCARYGGSDLDYWGQGTLVTVSS

SEQ ID NO: 1278 - protein, 122 aa, Artificial Sequence
  Description of Artificial Sequence: Synthetic polypeptide
EVQLLESGGGLVQPGGSLRLSCKASGYTFTSYGMRWVRQAPGKGLEWVGRISPGGGGTYYADSVKGRFTISRDNSKNTLYLQMNSLRAEDTAVYYCARDLYFYGYYYGFDVWGQGTLVTVSS

SEQ ID NO: 1279 - protein, 121 aa, Artificial Sequence
  Description of Artificial Sequence: Synthetic polypeptide
EVQLLESGGGLVQPGGSLRLSCKASGYTFSYYYMSWVRQAPGKGLEWVGRINPSGGGTYYADSVKGRFTISRDNSKNTLYLQMNSLRAEDTAVYYCARDRYGYYSSGIDYWGQGTLVTVSS

SEQ ID NO: 1280 - protein, 118 aa, Artificial Sequence
  Description of Artificial Sequence: Synthetic polypeptide
EVQLLESGGGLVQPGGSLRLSCKASGYTFTSYGMHWVRQAPGKGLEWIGAIYHSGSTNYNPSLKSRVTISRDNSKNTLYLQMNSLRAEDTAVYYCARGYYGSYGFDDWGQGTLVTVSS

SEQ ID NO: 1281 - protein, 118 aa, Artificial Sequence
  Description of Artificial Sequence: Synthetic polypeptide
EVQLLESGGGLVQPGGSLRLSCKASGFTFSSYWMSWVRQAPGKGLEWIGVINYSGSTYYNPSLKSRVTISRDNSKNTLYLQMNSLRAEDTAVYYCARDGYGYYGLDVWGQGTLVTVSS

SEQ ID NO: 1282 - protein, 114 aa, Artificial Sequence
  Description of Artificial Sequence: Synthetic polypeptide
EVQLLESGGGLVQPGGSLRLSCKASGYTFTSYSMSWVRQAPGKGLEWIGWINPSSGGTKYAEKFKGRATISRDNSKNTLYLQMNSLRAEDTAVYYCARKGLDYWGQGTLVTVSS

SEQ ID NO: 1283 - protein, 122 aa, Artificial Sequence
  Description of Artificial Sequence: Synthetic polypeptide
EVQLLESGGGLVQPGGSLRLSCKASGYTFTDYYMHWVRQAPGKGLEWVGRIRSKTDGGTTDYAASVKGRFTISRDNSKNTLYLQMNSLRAEDTAVYYCARGGYGGYYSIDYWGQGTLVTVSS

SEQ ID NO: 1284 - protein, 118 aa, Artificial Sequence
  Description of Artificial Sequence: Synthetic polypeptide
EVQLLESGGGLVQPGGSLRLSCKASGFTFSYYYMRWVRQAPGKGLEWIGRIDPSSGGTNYNEKFKGKATISRDNSKNTLYLQMNSLRAEDTAVYYCARYGGGSYFDYWGQGTLVTVSS

SEQ ID NO: 1285 - protein, 119 aa, Artificial Sequence
  Description of Artificial Sequence: Synthetic polypeptide
EVQLLESGGGLVQPGGSLRLSCKASGYTFTSYYMHWVRQAPGKGLEWIGVISYSGSTYYNPSLKSRVTISRDNSKNTLYLQMNSLRAEDTAVYYCARDDSGGYSDIDDWGQGTLVTVSS

SEQ ID NO: 1286 - protein, 119 aa, Artificial Sequence
  Description of Artificial Sequence: Synthetic polypeptide
EVQLLESGGGLVQPGGSLRLSCKASGYTFTSYYMNWVRQAPGKGLEWVGRISPDGGDTYYADSVKGRFTISRDNSKNTLYLQMNSLRAEDTAVYYCARGGYYSYYMDDWGQGTLVTVSS

SEQ ID NO: 1287 - protein, 121 aa, Artificial Sequence
  Description of Artificial Sequence: Synthetic polypeptide
EVQLLESGGGLVQPGGSLRLSCKASGFTFTYYSMSWVRQAPGKGLEWIGSINYSGSTYYNPSLKSRVTISRDNSKNTLYLQMNSLRAEDTAVYYCARSGNYSVYDYGMDDWGQGTLVTVSS

SEQ ID NO: 1288 - protein, 116 aa, Artificial Sequence
  Description of Artificial Sequence: Synthetic polypeptide
EVQLLESGGGLVQPGGSLRLSCKASGYTFSSYAMNWVRQAPGKGLEWIGYISYSGSTYYNPSLKSRVTISRDNSKNTLYLQMNSLRAEDTAVYYCARYYGGDMDVWGQGTLVTVSS

SEQ ID NO: 1289 - protein, 116 aa, Artificial Sequence
  Description of Artificial Sequence: Synthetic polypeptide
EVQLLESGGGLVQPGGSLRLSCKASGYTFTSYSMHWVRQAPGKGLEWIGYINYSGSTTYNPDLKRRRTIISRDNSKNTLYLQMNSLRAEDTAVYYCARVSYYLDYWGQGTLVIVSS

SEQ ID NO: 1290 - protein, 117 aa, Artificial Sequence
  Description of Artificial Sequence: Synthetic polypeptide
EVQLLESGGGLVQPGGSLRLSCKASGYTFTNYSIHWVRQAPGKGLEWIGWINPGSGSTNYDEKFKGRATISRDNSKNTLYLQMNSLRAEDTAVYYCARSDGDYMDYWGQGTLVTVSS

SEQ ID NO: 1291 - protein, 122 aa, Artificial Sequence
  Description of Artificial Sequence: Synthetic polypeptide
EVQLLESGGGLVQPGGSLRLSCKASGFTFTSYAMHWVRQAPGKGLEWVGRISPGGGATYYADSVKGRFTISRDNSKNTLYLQMNSLRAEDTAVYYCARDLYTYGYYYGMDVWGQGTLVTVSS

SEQ ID NO: 1292 - protein, 118 aa, Artificial Sequence
  Description of Artificial Sequence: Synthetic polypeptide
EVRLLESGGGLVQPGGSLRLSCKASGYTFTSYYMNWVRQAPGKGLEWIGWINPSSGSTKYAEKFKGRATISRDNSKNTLYLQMNSLRAEDTAVYYCARYYDGSYLDYWGQGTLVTVSS

SEQ ID NO: 1293 - protein, 119 aa, Artificial Sequence
  Description of Artificial Sequence: Synthetic polypeptide
EVQLLESGGGLVQPGGSLRLSCKASGYTFTDYAIHWVRQAPGKGLEWIGWINPSSGGTKYAEKFKGRATISRDNSKNTLYLQMNSLRAEDTAVYYCARGGYGYYALDYWGQGTLVTVSS

SEQ ID NO: 1294 - protein, 119 aa, Artificial Sequence
  Description of Artificial Sequence: Synthetic polypeptide
EVQLLESGGGLVQPGGSLRLSCKASGYTFTNYSMHWVRQAPGKGLEWIGLIYHSGSTYYNPSLKSRVTISRDNSKNTLYLQMNSLRAEDTAVYYCARGVHGGGYYFDYWGQGTLVTVSS

SEQ ID NO: 1295 - protein, 121 aa, Artificial Sequence
  Description of Artificial Sequence: Synthetic polypeptide
EVQLLESGGGLVQPGGSLRLSCKASGYTFSYYYMPWVRQAPGKGLEWIGWINPDSSGTNYNEKFKGKATLTISRDNSKNTLYLQMNSLRAEDTAVYYCARDHYYSYAMDVWGQGTLVTVSS

SEQ ID NO: 1296 - protein, 117 aa, Artificial Sequence
  Description of Artificial Sequence: Synthetic polypeptide
EVQLLESGGGLVQPGGSLRLSCKASGYTFTYYSMHWVRQAPGKGLEWIGWINPSSGSTKYAQKFKGRATISRDNSKNTLYLQMNSLRAEDTAVYYCARHGGDYMDYWGQGTLVTVSS

SEQ ID NO: 1297 - protein, 116 aa, Artificial Sequence
  Description of Artificial Sequence: Synthetic polypeptide
EVQLLESGGGLVHPGGSLRLSCKASGFTFTSYSMPWVRQAPGKGLEWIGVITYSGSTYYNPSLKSRVTISRDNSKNTLYLQMNSLRAEDTAVYYCARYDGDYLDYWGQGTLVTVSS

SEQ ID NO: 1298 - protein, 117 aa, Artificial Sequence
  Description of Artificial Sequence: Synthetic polypeptide
EVQLLESGGGLVQPGGSLRLSCKASGYTFSYYYMHWVRQAPGKGLEWIGRINPNSGSTKYNKKFKGRATISRDNSKNTLYLQMNSLRAEDTAVYYCARDGGDAIDYWGQGTLVTVSS

SEQ ID NO: 1299 - protein, 119 aa, Artificial Sequence
  Description of Artificial Sequence: Synthetic polypeptide
EVQLLESGGGLVQPGGSLRLSCKASGFTFTSYSMYWVRQAPGKGLEWIGRIDPGSDGTKYNEKFKGKATISRDNSKNTLYLQMNSLRAEDTAVYYCARDGGYSYGLDYWGQGTLVTVSS

SEQ ID NO: 1300 - protein, 119 aa, Artificial Sequence
  Description of Artificial Sequence: Synthetic polypeptide
EVQLLESGGGLVQPGGSLRLSCKASGFTFSSYSMYWVRQAPGKGLEWVGRINPGGGGTYYADSFKGRFTISRDNSKNTLYLQMNSLRAEDTAVYYCARGHRYSYAFDYWGQGTLVTVSS

SEQ ID NO: 1301 - protein, 119 aa, Artificial Sequence
  Description of Artificial Sequence: Synthetic polypeptide
EVQLLESGGGLVQPGGSLRLSCKASGFTFTSYYMYWVRQAPGKGLEWIGRINPNSGGTKYDEKFKGRATISRDNSKNTLYLQMNSLRAEDTAVYYCARGGRGSWDFDDWGQGTLVTVSS

SEQ ID NO: 1302 - protein, 119 aa, Artificial Sequence
  Description of Artificial Sequence: Synthetic polypeptide
EVQLLESGGGLVQPGGSLRLSCKASGYTFSSYSMNWVRQAPGKGLEWIGWIDPGNGDTKYNEKFKGKATISRDNSKNTLYLQMNSLRAEDTAVYYCARDAYYSGGMNYWGQGTLVTVSS

SEQ ID NO: 1303 - protein, 120 aa, Artificial Sequence
  Description of Artificial Sequence: Synthetic polypeptide
EVQLLESGGGLVQPGGSLRLSCKASGYTFSSYAMRWVRQAPGKGLEWIGWIDPDNSGTNYNEKFKGKATISRDNSKNTLYLQMNSLRAEDTAVYYCARYYGYGGYDFDYWGQGTLVTVSS

SEQ ID NO: 1304 - protein, 122 aa, Artificial Sequence
  Description of Artificial Sequence: Synthetic polypeptide
EVQLLESGGGLVQPGGSLRLSCKASGYTFSSYAMSWVRQAPGKGLEWVGRISPGGGNTYYADSVKGRATISRDNSKNTLYLQMNSLRAEDTAVYYCARSRYSYVYDYGMDYWGQGTLVTVSS

SEQ ID NO: 1305 - protein, 119 aa, Artificial Sequence
  Description of Artificial Sequence: Synthetic polypeptide
EVQLLESGGGLVQPGGSLRLSCKASGFTFSSYYMSWVRQAPGKGLEWVGRISPSGGGTYYADSVKGRFTISRDNSKNTLYLQMNSLRAEDTAVYYCARDGYGYYYMDVWGQGTLVTVSS

SEQ ID NO: 1306 - protein, 119 aa, Artificial Sequence
  Description of Artificial Sequence: Synthetic polypeptide
EVQLLESGGGLVQPGGSLRLSCKASGYTFSYYSMRWVRQAPGKGLEWIGRIDPGNGGTKYNEKFKGKATISRDNSKNTLYLQMNSLRAEDTAVYYCARDRGGYYYLDYWGQGTLVTVSS

SEQ ID NO: 1307 - protein, 119 aa, Artificial Sequence
  Description of Artificial Sequence: Synthetic polypeptide
EVQLLESGGGLVQPGGSLRLSCKASGFTFSSYSMRWVRQAPGKGLEWVGRINPGGGDTYYADSFKGRFTISRDNSKNTLYLQMNSLRAEDTAVYYCARYGYGGYGLDVWGQGTLVTVSS

SEQ ID NO: 1308 - protein, 119 aa, Artificial Sequence
  Description of Artificial Sequence: Synthetic polypeptide
EVQLLESGGGLVQPGGSLRLSCKTSGYTFSDYAMSWVRQAPGKGLEWVGRISPGGGGTYYADSFKGRFTISRDNSKNTLYLQMNSLRAEDTAVYYCARGYYGYYDLDDWGQGTLVTVSS

SEQ ID NO: 1309 - protein, 118 aa, Artificial Sequence
  Description of Artificial Sequence: Synthetic polypeptide
EVQLLESGGGLVQPGGSLRLSCKASGYTFTNYAIHWVRQAPGKGLEWIGAINYSGSTYYNPSLKSRVTISRDNSKNTLYLQMNSLRAEDTAVYYCARDGGGYYGMDVWGQGTLVTVSS

SEQ ID NO: 1310 - protein, 122 aa, Artificial Sequence
  Description of Artificial Sequence: Synthetic polypeptide
EVQLLESGGGLVQPGGSLRLSCKASGYTFSSYSMSWVRQAPGKGLEWIGRIDPNSGSTNYNEKFEGKATISRDNSKNTLYLQMNSLRAEDTAVYYCARDLYYSGYYYALDDWGQGTLVTVSS

SEQ ID NO: 1311 - protein, 120 aa, Artificial Sequence
  Description of Artificial Sequence: Synthetic polypeptide
EVQLLESGGGLVQPGGSLRLSCKASGYTFSSYGMHWVRQAPGKGLEWIGVIYHSGSTYYNPSLKSRVTISRDNSKNTLYLQMNSLRAEDTAVYYCARDRGDYGSYYFDYWGQGTLVTVSS

SEQ ID NO: 1312 - protein, 118 aa, Artificial Sequence
  Description of Artificial Sequence: Synthetic polypeptide
EVQLLESGGGLVQPGGSLRLSCKASGYTFSSYWMRWVRQAPGKGLEWIGAISYSGSTNYNPSLKSRVTISRDNSKNTLYLQMNSLRAEDTAVYYCARGGYGSYDLDFWGQGTLVTVSS

SEQ ID NO: 1313 - protein, 119 aa, Artificial Sequence
  Description of Artificial Sequence: Synthetic polypeptide
EVQLLESGGGLVQPGGSLRLSCKASGFTFSYYWMSWVRQAPGKGLEWIGWIDPNNSGTKYNEKFKGKATISRDNSKNTLYLQMNSLRAEDTAVYYCARGYSGSWYIDYWSQGTLVTVSS

SEQ ID NO: 1314 - protein, 120 aa, Artificial Sequence
  Description of Artificial Sequence: Synthetic polypeptide
EVQLLESGGGLVQPGGSLRLSCKASGFTFSYYWMNWVRQAPGKGLEWVGRISPDGGDTYYADSVKSRFTISRDNSKNTLYLQMNSLRAEDTAVYYCARDGYYGYYALDYWGQGTLVTVSS

SEQ ID NO: 1315 - protein, 116 aa, Artificial Sequence
  Description of Artificial Sequence: Synthetic polypeptide
EVQLLESGGGLVQPGGSLRLSCKASGFTFSSYWMSWVRQAPGKGLEWIGWINPSSGGTKYDQKFKGRATISRDNSKNTLYLQMNSLRAEDTAVYYCARGSGGMADWGQGTLVTVSS

SEQ ID NO: 1316 - protein, 123 aa, Artificial Sequence
  Description of Artificial Sequence: Synthetic polypeptide
EVQLLESGGGLVQPGGSLRLSCKASGFTFSSYYMNWVRQAPGKGLEWIGRINPSSGSTKYNEKFKGRATISRDNSKNTLYLQMNSLRAEDTAVYYCARDPYYRDSSYYAIDFWGQGTLVTVSS

SEQ ID NO: 1317 - protein, 119 aa, Artificial Sequence
  Description of Artificial Sequence: Synthetic polypeptide
EVQLLESGGGLVQPGGSLRLSCKASGYTFSSYYMHWVRQAPGKGLEWVGRISPGGGGTYYADSVKGRFTISRDNSKNTLYLQMNSLRAEDTAVYYCARGGRLSWYMDFWGQGTLVTVSS

SEQ ID NO: 1318 - protein, 118 aa, Artificial Sequence
  Description of Artificial Sequence: Synthetic polypeptide
EVQLLESGGGLVQPGGSLRLSCKASGYTFTSYSMRWVRQAPGKGLEWIGAINYSGSTNYNPSLKSRVTISRDNSKNTLYLQMNSLRAEDTAVYYCARDGYYGYGIDDWGQGTLVTVSS

SEQ ID NO: 1319 - protein, 120 aa, Artificial Sequence
  Description of Artificial Sequence: Synthetic polypeptide
KVQLLESGGGLVQPGGSLRLSCKASGYTFSSYAMRWVRQAPGKGLEWIGWINPSSGGTKYAEKFKGRATISRDNSKNTLYLQMNSLRAEDTAVYYCARDDYYGSSDFDYWGQGTLVTVSS

SEQ ID NO: 1320 - protein, 117 aa, Artificial Sequence
  Description of Artificial Sequence: Synthetic polypeptide
EVQLLESGGGLVQPGGSLRLSCKASGFTFSSYAMNWVRQAPGKGLEWIGAIYHSGSTNYNPSLKSRVTISRDNSKNTLYLQMNSLRAEDTAVYYCARTGGWGYFDYWGQGTLVTVSS

SEQ ID NO: 1321 - protein, 121 aa, Artificial Sequence
  Description of Artificial Sequence: Synthetic polypeptide
EVQLLESGGGLVQPGGSLRLSCKASGFTFSYYAMHWVRQAPGKGLEWIGSIYHSGSTYYNPSLKSRVTISRDNSKNTLYLQMNSLRAEDTAVYYCARSRNASDYYYGMDVWGQGTLVTVSS

SEQ ID NO: 1322 - protein, 118 aa, Artificial Sequence
  Description of Artificial Sequence: Synthetic polypeptide
EVQLLESGGGLVQPGGSLRLSCKASGYTFSSYAMYWVRQAPGKGLEWVGRINPGGGGTYYADSFKGRFTISRDNSKNTLYLQMNSLRAEDTAVYYCARGGRWSYFDYWGQGTLVTVSS

SEQ ID NO: 1323 - protein, 122 aa, Artificial Sequence
  Description of Artificial Sequence: Synthetic polypeptide
EVQLLESGGGLVQPGGSLRLSCKASGYTFSSYSMNWVRQAPGKGLEWVGRINPGGGSTYYADSVKGRFTISRDNSKNTLYLQMNSLRAEDTAVYYCARDIYYTGYYYAFDDWGQGTLVTVSS

SEQ ID NO: 1324 - protein, 117 aa, Artificial Sequence
  Description of Artificial Sequence: Synthetic polypeptide
EVQLLESGGGLVQPGGSLRLSCKASGYTFSSYAMRWVRQAPGKGLEWIGWINPDGGATYYADSVKGRFTISRDNSKNTLYLQMNSLRAEDTAVYYCARSGYYDLDYWGQGTLVTVSA

SEQ ID NO: 1325 - protein, 115 aa, Artificial Sequence
  Description of Artificial Sequence: Synthetic polypeptide
EVQLLESGGGLVQPGGSLRLSCKASGYTFTSYWMRWVRQAPGKGLEWIGEISYSGSTNYNPSLKSRVTISRDNSKNTLYLQMNSLRAEDTAVYYCARRGGAMDDWGQGTLVTVSS

SEQ ID NO: 1326 - protein, 118 aa, Artificial Sequence
  Description of Artificial Sequence: Synthetic polypeptide
EVQLLESGGGLVQPGGSLRLSCKASGFTFSSYAMHWVRQAPGKGLEWVGRISPSGGGTYYADSVKGRFTISRDNSKNTLYLQMNSLRAEDTAVYYCARERYGSGLDYWGQGTLVTVSS

SEQ ID NO: 1327 - protein, 121 aa, Artificial Sequence
  Description of Artificial Sequence: Synthetic polypeptide
EVQLLESGGGLVQPGGSLRLSCKASGFTFSAYSMPWVRQAPGKGLEWIGVINYSGSTNYNPSLKSRVTISRDNSKNTLYLQMNSLRAEDTAVYYCARGGGYSGYYYAMDYWGQGTLVTVSS

SEQ ID NO: 1328 - protein, 122 aa, Artificial Sequence
  Description of Artificial Sequence: Synthetic polypeptide
EVQLLESGGGLVQPGGSLRLSCKASGFTFSYYYMRWVRQAPGKGLEWIGYITYSGSTYYNPSLKSRVTISRDNSKNTLYLQMNSLRAEDTAVYYCARKGADHLTMGQPFDDWGQGTLVTVSS

SEQ ID NO: 1329 - protein, 111 aa, Artificial Sequence
  Description of Artificial Sequence: Synthetic polypeptide
EVQLLESGGGLVQPGGSLRLSCKASGYTFSYYYMSWVRQAPGKGLEWIGRINPDSGSTKYDEKFKGRATISRDNSKNTLYLQMNSLRAEDTAVYYYAMDYWGQGTLVTVSS

SEQ ID NO: 1330 - protein, 123 aa, Artificial Sequence
  Description of Artificial Sequence: Synthetic polypeptide
EVQLLESGGGLVQPGGSLRLSCKASGYTFTNYWIHWVRQAPGKGLEWVGRISPGGGGTYYADSFKGRFTISRDNSKNTLYLQMNSLRAEDTAVYYCARMGSDRITVVQPFDYWGQGTLVTVSS

SEQ ID NO: 1331 - protein, 122 aa, Artificial Sequence
  Description of Artificial Sequence: Synthetic polypeptide
EVQLLESGGGLVQPGGSLRLSCKASGYTFTSYSMNWVRQAPGKGLEWIGYITYSGSTYYNPDLKNRRTIISRDNSKNTLYLQMNSLRAEDTAVYYCARDLYNSASYYGIDYWGQGTLVTVSS

SEQ ID NO: 1332 - protein, 120 aa, Artificial Sequence
  Description of Artificial Sequence: Synthetic polypeptide
EVQLLESGGGLVQPGGSLRLSCKASGYTFTSYYMYWVRQAPGKGLEWIGRINPSSGGTKYNEKFKGKATISRDNSKNTLYLQMNSLRAEDTAVYYCARGGGYGYYYMDVWGQGTLVTVSS

SEQ ID NO: 1333 - protein, 115 aa, Artificial Sequence
  Description of Artificial Sequence: Synthetic polypeptide
EVQLLESGGGLVQPGGSLRLSCKASGYTFTSYSMNWVRQAPGKGLEWIGAIYYSGSTNYNPSLKSRVTISRDNSKNTLYLQMNSLRAEDTAVYYCARDGYGIDYWGQGTLVTVSS

SEQ ID NO: 1334 - protein, 116 aa, Artificial Sequence
  Description of Artificial Sequence: Synthetic polypeptide
EVQLLESGGGLVQPGGSLRLSCKASGYTFTDYWMRWVRQAPGKGLEWIGYISHSGSTYYNPSLKSRVTISRDNSKNTLYLQMNSLRAEDTAVYYCAREGGNDFDYWGQGTLVTVSS

SEQ ID NO: 1335 - protein, 115 aa, Artificial Sequence
  Description of Artificial Sequence: Synthetic polypeptide
EVQLLESGGGLVQPGGSLRLSCKASGFTFSSYGMHWVRQAPGKGLEWIGFISYSGSTNYNPSLKSRVTISRDNSKNTLYLQMNSLRAEDTAVYYCARRGSYLAFWGQGTLVTVSS

SEQ ID NO: 1336 - protein, 119 aa, Artificial Sequence
  Description of Artificial Sequence: Synthetic polypeptide
EVQLLESGGGLVQPGGSLRLSCKASGFTFTSYWMHWVRQAPGKGLEWIGVISYSGSTYYNPSLKSRVTISRDNSKNTLYLQMNSLRAEDTAVYYCARDHYYGSYAFDYWGQGTLVTVSS

SEQ ID NO: 1337 - protein, 120 aa, Artificial Sequence
  Description of Artificial Sequence: Synthetic polypeptide
EVQLLESGGGLVQPGGSLRLSCKASGYTFTSYWMHWVRQAPGKGLEWIGRINPNNGGTKYNEKFKGKATISRDNSKNTLYLQMNSLRAEDTAVYYCARRVYGPGYAMDYWGQGTLVTVSS

SEQ ID NO: 1338 - protein, 116 aa, Artificial Sequence
  Description of Artificial Sequence: Synthetic polypeptide
EVQLLESGGGLVQPGGSLRLSCKASGFTFTSYSMHWVRQAPGKGLEWIGWINPDSGSTNYDEKFKGRATISRDNSKNTLYLQMNSLRAEDTAVYYCARYHGDLDYWGQGTLVTVSS

SEQ ID NO: 1339 - protein, 114 aa, Artificial Sequence
  Description of Artificial Sequence: Synthetic polypeptide
EVQLLESGGGLVQPGGSLRLSCKASGYTFTDYAMHWVRQAPGKGLEWVGRISPGGGTTYYADSFKGRFTISRDNSKNTLYLQMNSLRAEDTAVYYCARAGRDYWGQGTLVTVSS

SEQ ID NO: 1340 - protein, 122 aa, Artificial Sequence
  Description of Artificial Sequence: Synthetic polypeptide
EVQLLESGGGLVQPGGSLRLSCKASGFTFSSYSMSWVRQAPGKGLEWIGWINPSSGSTKYDEKFKGRATISRDNSKNTLYLQMNSLRAEDTAVYYCARSGNGYVYDYSMDDWGQGTLVTVSS

SEQ ID NO: 1341 - protein, 122 aa, Artificial Sequence
  Description of Artificial Sequence: Synthetic polypeptide
EVQLLESGGGLVQPGGSLRLSCKASGYTFSSYSMHWVRQAPGKGLEWIGYINYSGSTTYNPDLKKRRFTISRDNSKNTLYLQMNSLRAEDTAVYYCARSRYGSVYDYAMDFWGQGTLVTVSS

SEQ ID NO: 1342 - protein, 118 aa, Artificial Sequence
  Description of Artificial Sequence: Synthetic polypeptide
EVQLLESGGGLVQPGVCVCLARPLGYTFSAYSMPWVRQAPGKGLEWIDEISYSGSTYYNPSLKSRVTISRDNSKNTLYLQMNSLRAEDTAVYYCARDRGGGYYDLDFWGQGTLVMSRA

SEQ ID NO: 1343 - protein, 116 aa, Artificial Sequence
  Description of Artificial Sequence: Synthetic polypeptide
EVQLLESGGGLVQPGGSLRLSCKASGYTFTNYSIHWVRQAPGKGLEWIGAINYSGSTYYNPSLKSRVTISRDNSKNTLYLQMNSLRAEDTAVYYCARGGYYALDYWGQGTLVTVSS

SEQ ID NO: 1344 - protein, 119 aa, Artificial Sequence
  Description of Artificial Sequence: Synthetic polypeptide
EVQLLESGGGLVQPGGSLRLSCKASGYTFSSYSMSWVRQAPGKGLEWIGEIYYSGSTYYNPSLKSRVTISRDNSKNTLYLQMNSLRAEDTAVYYCARQLFGVGYDMDYWGQGTLVTVSS

SEQ ID NO: 1345 - protein, 122 aa, Artificial Sequence
  Description of Artificial Sequence: Synthetic polypeptide
EVQLLESGGGLVQPGGSLRLSCKASGYTFSSYYMPWVRQAPGKGLEWVGRISPDGGDTYYADSVKGRFTISRDNSKNTLYLQMNSLRAEDTAVYYCARGGGYSDYYYAIDYWGQGTLVTVSS

SEQ ID NO: 1346 - protein, 116 aa, Artificial Sequence
  Description of Artificial Sequence: Synthetic polypeptide
KVQLLESGGGLVQPGGSLRLSCKASGYTFSSYAMSWVRQAPGKGLEWVGRISPDSGGTNYTEKFKGRATISRDNSKNTLYLQMNSLRAEDTAVYYCARGGSGLDVWGQGTLVTVSS

SEQ ID NO: 1347 - protein, 116 aa, Artificial Sequence
  Description of Artificial Sequence: Synthetic polypeptide
EVQLLESGGGLVQPGGSLRLSCKASGYTFSSYSMHWVRQAPGKGLEWIGWINPSSGGTNYAEKFKGRATISRDNSKNTLYLQMNSLRAEDTAVYYCARGYSALDVWGQGTLVTVSS

SEQ ID NO: 1348 - protein, 122 aa, Artificial Sequence
  Description of Artificial Sequence: Synthetic polypeptide
EVQLLESGGGLVQPGGSLRLSCKASGFTFSSYAMHWVRQAPGKGLEWIGWINPSSDSTNYAQKFKGRATISRDNSKNTLYLQMNSLRAEDTAVYYCARGGYGYSGYGDIDVWGQGTLVTVSS

SEQ ID NO: 1349 - protein, 117 aa, Artificial Sequence
  Description of Artificial Sequence: Synthetic polypeptide
EVQLLESGGGLVQPGGSLRLSCKASGFTFTSYAMSWVRQAPGKGLEWVGRINPDGGDTYYADSVKGRFTISRDNSKNTLYLQMNSLRAEDTAVYYCARYYSGFLDDWGQGTLVTVSS

SEQ ID NO: 1350 - protein, 113 aa, Artificial Sequence
  Description of Artificial Sequence: Synthetic polypeptide
EVQLLESGGGLVQPGGSLRLSCKASGYTFSSYAMPWVRQAPGKGLEWVGRISPNGGTTYYADSVKGRFTISRDNSKNTLYLQMNSLRAEDTAVYYYSYAIDYWGQGTLVTVSS

SEQ ID NO: 1351 - protein, 119 aa, Artificial Sequence
  Description of Artificial Sequence: Synthetic polypeptide
EVQLLESGGGLVQPGGSLRLSCKASGFTFSSYWMYWVRQAPGKGLEWVGRISPGGGDTYYADSVKGRFTISRDNSKNTLYLQMNSLRAEDTAVYYCARHSSGPYSMDYWGQGTLVTVSS

SEQ ID NO: 1352 - protein, 120 aa, Artificial Sequence
  Description of Artificial Sequence: Synthetic polypeptide
EVQLLESGGGLVQPGGSLRLSCKASGYTFSAYYMSWVRQAPGKGLEWVGRISPGGGDTYYAASVKGRFTISRDNSKNTLYLQMNSLRAEDTAVYYCARDDYYGSSALDFWGQGTLVTVSS

SEQ ID NO: 1353 - protein, 118 aa, Artificial Sequence
  Description of Artificial Sequence: Synthetic polypeptide
EVQLLESGGGLVQPGGSLRLSCKASGFTFTSYWMHWVRQAPGKGLEWIGEITYSGSTYYNPSLKSRVTISRDNSKNTLYLQMNSLRAEDTAVYYCARGDYLYWYLDYWGQGTLVTVSS

SEQ ID NO: 1354 - protein, 118 aa, Artificial Sequence
  Description of Artificial Sequence: Synthetic polypeptide
EVQLLESGGGLVQPGGSLRLSCKASGFTFSSYSMNWVRQAPGKGLEWIGWINPSSGSTKYDEKFKGRATISRDNSKNTLYLQMNSLRAEDTAVYYCARYGGYYGMDVWGQGTLVTVSS

SEQ ID NO: 1355 - protein, 123 aa, Artificial Sequence
  Description of Artificial Sequence: Synthetic polypeptide
EVQLLESGGGLVQPGGSLRLSCKASGFTFSAYSMYWVRQAPGKGLEWVGRISPGGGSTYYAASVKGRATISRDNSKNTLYLQMNSLRAEDTAVYYCARVGSDHLSEDEPFDDWGQGTLVTVSS

SEQ ID NO: 1356 - protein, 119 aa, Artificial Sequence
  Description of Artificial Sequence: Synthetic polypeptide
EVQLLESGGGLVQPGGSLRLSCKASGFTFSFYSMHWVRQAPGKGLEWIGLISHSGSTYYNPSLKSRVTISRDNSKNTLYLQMNSLRAEDTAVYYCARGYGYYSYYLDFWGQGTLVTVSS

SEQ ID NO: 1357 - protein, 117 aa, Artificial Sequence
  Description of Artificial Sequence: Synthetic polypeptide
EVQLLESGGGLVQPGGSLRLSCKASGFTFTSYSMNWVRQAPGKGLEWIGSITYSGSTNYNPSLKSRVTISRDNSKNTLYLQMNSLRAEDTAVYYCARDGYGGSLAVWGQGTLVTVSS

SEQ ID NO: 1358 - protein, 118 aa, Artificial Sequence
  Description of Artificial Sequence: Synthetic polypeptide
EVQLLESGGGLVQPGGSLRLSCKASGYTFTSYSMRWVRQAPGKGLEWIGAITHSGSTYYNPSLKSRVTISRDNSKNTLYLQMNSLRAEDTAVYYCARDRYYGDAFDYWGQGTLVTVSS

SEQ ID NO: 1359 - protein, 116 aa, Artificial Sequence
  Description of Artificial Sequence: Synthetic polypeptide
EVQLLESGGGLVQPGGSLRLSCKASGFTFTYYYMYWVRQAPGKGLEWIGWINPDSGSTNYTEKFKGRFTISRDNSKNTLYLQMNSLRAEDTAVYYCARGGTGMAYWGQGTLVTVSS

SEQ ID NO: 1360 - protein, 118 aa, Artificial Sequence
  Description of Artificial Sequence: Synthetic polypeptide
EVQLLESGGGLVQPGGSLRLSCKASGYTFTSYSMHWVRQAPGKGLEWIGEISYSGSTNYNPSLKSRVTISRDNSKNTLYLQMNSLRAEDTAVYYCARDGYGYYYLDFWGQGTLVTVSS

SEQ ID NO: 1361 - protein, 118 aa, Artificial Sequence
  Description of Artificial Sequence: Synthetic polypeptide
EVQLLESGGGLVQPGGSLRLSCKASGFTFSSYWMHWVRQAPGKGLEWIGEISHSGSTYYNPSLKSRVTISRDNSKNTLYLQMNSLRAEDTAVYYCARGDSGYWSIDYWGQGTLVTVSS

SEQ ID NO: 1362 - protein, 118 aa, Artificial Sequence
  Description of Artificial Sequence: Synthetic polypeptide
EVQLLESGGGLVQPGGSLRLSCKASGYTFSSYSINWVRQAPGKGLEWIGRINPSNGGTNYNQKFKGKATISRDNSKNTLYLQMNSLRAEDTAVYYCARDGYGYGFDFWGQGTLVTVSS

SEQ ID NO: 1363 - protein, 117 aa, Artificial Sequence
  Description of Artificial Sequence: Synthetic polypeptide
EVQLLESGGGLVQPGGSLRLSCKASGFTFSSYSIHWVRQAPGKGLEWVGRISPSGGGTYYADSFKGRFTISRDNSKNTLYLQMNSLRAEDTAVYYCARGGGSGIDYWGQGTLVTVSS

SEQ ID NO: 1364 - protein, 118 aa, Artificial Sequence
  Description of Artificial Sequence: Synthetic polypeptide
EVQLLESGGGLVQPGGSLRLSCKASGFTFTDYWMSWVRQAPGKGLEWIGDIYHSGSTNYNPSLKSRVTISRDNSKNTLYLQMNSLRAEDTAVYYCARDGYGSDGFDYWGQGTLVTVSS

SEQ ID NO: 1365 - protein, 122 aa, Artificial Sequence
  Description of Artificial Sequence: Synthetic polypeptide
EVQLLESGGGLVQPGGSLRLSCKASGYTFSSYWMSWVRQAPGKGLEWIGWINPGGGSTYYADSVKGRFTISRDNSKNTLYLQMNSLRAEDTAVYYCARDIYIYGYYYAMDDWGQGTLVTVSS

SEQ ID NO: 1366 - protein, 118 aa, Artificial Sequence
  Description of Artificial Sequence: Synthetic polypeptide
PVQLLESGGGLVQPGGSLRLSCKASGYTFTSYSMNWVRQAPGKGLEWIGLIYHSGSTNYNPSLKSRVTISRDNSKNTLYLQMNSLRAEDTAVYYCARYGGYSYYMDVWGQGTLVTVSS

SEQ ID NO: 1367 - protein, 119 aa, Artificial Sequence
  Description of Artificial Sequence: Synthetic polypeptide
EVQLLESGGGLVQPGGSLRLSCKASGYTFSSYWMSWVRQAPGKGLEWVGRISPGGGNTYYADSFKGRFTISRDNSKNTLYLQMNSLRAEDTAVYYCARKPYSYYGFDYWGQGTLVTVSS

SEQ ID NO: 1368 - protein, 122 aa, Artificial Sequence
  Description of Artificial Sequence: Synthetic polypeptide
EVQLLESGGGLVQPGGSLRLSCKASGFTFSSYYMNWVRQAPGKGLEWIGWINPDSGGTNYAEKFKGRATISRDNSKNTLYLQMNSLRAEDTAVYYCARSGFDYFYDYGMDVWGQGTLVTVSS

SEQ ID NO: 1369 - protein, 119 aa, Artificial Sequence
  Description of Artificial Sequence: Synthetic polypeptide
EVQLLESGGGLVQPGGSLRLSCKASGYTFSYYAMNWVRQAPGKGLEWIGRINPGSGSTKYAQKLKGRATISRDNSKNTLYLQMNSLRAEDTAVYYCARYGYGSDRIDYWGQGTLVTVSS

SEQ ID NO: 1370 - protein, 121 aa, Artificial Sequence
  Description of Artificial Sequence: Synthetic polypeptide
RVQLLESGGGLVQPGGSLRLSCKASGFTFTSYSMHWVRQAPGKGLEWIGLISYSGSTNYNPSLKSRVTISRDNSKNTLYLQMNSLRAEDTAVYYCARSGNSYDYYYGMDDWGQGTLVTVSS

SEQ ID NO: 1371 - protein, 119 aa, Artificial Sequence
  Description of Artificial Sequence: Synthetic polypeptide
EVQLLESGGGLVQPGGSLRLSCKASGFTFSSYSMRWVRQAPGKGLEWIGVISHSGSTYYNPSLKSRVTISRDNSKNTLYLQMNSLRAEDTAVYYCARDGYGSYYGMDVWGQGTLVTVSS

SEQ ID NO: 1372 - protein, 119 aa, Artificial Sequence
  Description of Artificial Sequence: Synthetic polypeptide
EVQLLESGGGLVQPGGSLRLSCKASGYTFSSYWMRWVRQAPGKGLEWVGRINPSGGGTYYAASVKGRFTISRDNSKNTLYLQMNSLRAEDTAVYYCARGHYLSYSMDYWGQGTLVTVSS

SEQ ID NO: 1373 - protein, 127 aa, Artificial Sequence
  Description of Artificial Sequence: Synthetic polypeptide
EVQLLESGGGLVQPGGSLRLSCKASGYTFTNYSMHWVRQAPGKGLEWVGRINPSGGGTYYADSVKGRFTISRDNSKNTLYLQMNSLRAEDTAVYYCARDLYNTGYYYGSNGYALDYWGQGTLVTVSS

SEQ ID NO: 1374 - protein, 118 aa, Artificial Sequence
  Description of Artificial Sequence: Synthetic polypeptide
EVQLLESGGGLVQPGGSLRLSCKASGFTFSSYSMHWVRQAPGKGLEWIGLITYSGSTYYNPSLKSRVTISRDNSKNTLYLQMNSLRAEDTAVYYCARRGPYYGGFDYWGQGTLVTVSS

SEQ ID NO: 1375 - protein, 108 aa, Artificial Sequence
  Description of Artificial Sequence: Synthetic polypeptide
DIQMTQSPSSLSASVGDRVTITCRASQSVSSYLDWYQQKPGKAPKLLIYAASSLQSGVPSRFSGSGSGTDFTLTISSLQPEDFATYYCQSYNSSTSVVFGGGTKVEIK

SEQ ID NO: 1376 - protein, 108 aa, Artificial Sequence
  Description of Artificial Sequence: Synthetic polypeptide
DIQMTQSPSSLSASVGDRVTITCRASQAVSKYLDWYQQKPGKAPKLLIYAASSLQSGVPSRFSGSGSGTDFTLTISSLQPEDFATYYCSPYTSSHPLVFGGGTKVEIK

SEQ ID NO: 1377 - protein, 108 aa, Artificial Sequence
  Description of Artificial Sequence: Synthetic polypeptide
DIQMTQSPSSLSASVGDRVTITCRASQAISNYLAWYQQKPGKAPKLLIYAASSLQSGVPSRFSGSGSGTDFTLTISSLQPEDFATYYCQVYDGSPPFAFGGGTKVEIK

SEQ ID NO: 1378 - protein, 109 aa, Artificial Sequence
  Description of Artificial Sequence: Synthetic polypeptide
DIQMTQSPSSLSASVGDRVTITCRASQAVSKYLNWYQQKPGKAPKLLIYAASSLQSGVPSRFSGSGSGTDFTLTISSLQPEDFATYYCQSWDNSSDHDVFGGGTKVEIK

SEQ ID NO: 1379 - protein, 109 aa, Artificial Sequence
  Description of Artificial Sequence: Synthetic polypeptide
DIQMTQSPSSLSASVGDRVTITCRASQAVSTYLNWYQQKPGKAPKLLIYAASSLQSGVPSRFSGSGSGTDFTLTISSLQPEDFATYYCQSYDASSSHGVFGGGTKVEIK

SEQ ID NO: 1380 - protein, 107 aa, Artificial Sequence
  Description of Artificial Sequence: Synthetic polypeptide
DIQMTQSPSSLSASVGDRVTITCRASQAVSTYLNWYQQKPGKAPKLLIYAASSLQSGVPSRFSGSGSGTDFTLTISSLQPEDFATYYCQQWSSYPVVFGGGTKVEIK

SEQ ID NO: 1381 - protein, 108 aa, Artificial Sequence
  Description of Artificial Sequence: Synthetic polypeptide
DIQITQSPSSLSASVGDRVTITCRASQAVSKYLYWYQQKPGKAPKLLIYAASSLQSGVPSRFSGSGSGTDFTLTISSLQPEDFATYYCQSWDSSPTLVFGGGTKVEIK

SEQ ID NO: 1382 - protein, 108 aa, Artificial Sequence
  Description of Artificial Sequence: Synthetic polypeptide
DIQMTQSPSSLSASVGDRVTITCRASQDISTYLNWYQQKPGKAPKLLIYAASSLQSGVPSRFSGSGSGTDFTLTISSLQPEDFATYYCQAYDSSPPFAFGGGTKVEIK

SEQ ID NO: 1383 - protein, 107 aa, Artificial Sequence
  Description of Artificial Sequence: Synthetic polypeptide
DIQMTQSPSSLSASVGDRVTITCRASQAVSRYLAWYQQKPGKAPKLLIYAASSLQSGVPSRFSGSGSGTDFTLTISSLQPEDFATYYCQQGSSSPWTFGGGTKVEIK

SEQ ID NO: 1384 - protein, 109 aa, Artificial Sequence
  Description of Artificial Sequence: Synthetic polypeptide
DIQMTQSPSSLSASVGDRVTITCRASQSVSRYLHWYQQKPGKAPKLLIYAASSLQSGVPSRFSGSGSGTDFTLTISSLQPEDFATYYCQSWDNSVAAVVFGGGTKVEIK

SEQ ID NO: 1385 - protein, 109 aa, Artificial Sequence
  Description of Artificial Sequence: Synthetic polypeptide
DIQMTQSPSSLSASVGDRVTITCRASQAISRYLDWYQQKPGKAPKLLIYAASSLQSGVPSRFSGSGSGTDFTLTISSLQPEDFATYYCQSHDNSSNNVVFGGGTKVEIK

SEQ ID NO: 1386 - protein, 108 aa, Artificial Sequence
  Description of Artificial Sequence: Synthetic polypeptide
DIQMTQSPSSLSASVGDRVTITCRASQSVSTYLHWYQQKPGKAPKLLIYAASSLQSGVPSRFSGSGSGTDFTLTISSLQPEDFATYYCPPYASSPPVVFGGGTKVEIK

SEQ ID NO: 1387 - protein, 109 aa, Artificial Sequence
  Description of Artificial Sequence: Synthetic polypeptide
DIQMTQSPSSLSASVGDRVTITCRASQAVSSYLAWYQQKPGKAPKLLIYAASSLQSGVPSRFSGSGSGTDFTLTISSLQPEDFATYYCEAWDDSLNHYVFGGGTKVEIK

SEQ ID NO: 1388 - protein, 106 aa, Artificial Sequence
  Description of Artificial Sequence: Synthetic polypeptide
DIQMTQSPSSLSASVGDRVTITCRASQDVSRYLHWYQQKPGKAPKLLIYAASSLQSGVPSRFSGSGSGTDFTLTISSLQPEDFATYYCQQSSSYWTFGGGTKVEIK

SEQ ID NO: 1389 - protein, 108 aa, Artificial Sequence
  Description of Artificial Sequence: Synthetic polypeptide
DIQMTQSPSSLSASVGDRVTITCRASQSVSTYLAWYQQKPGKAPKLLIYAASSLQSGVPSRFSGSGSGTDFTLTISSLQPEDFATYYCQSWDGSYTGMFGGGTKVEIK

SEQ ID NO: 1390 - protein, 109 aa, Artificial Sequence
  Description of Artificial Sequence: Synthetic polypeptide
DIQMTQPPSSLSASVGDRVTITCRASQAVSNYLDWYQQKPGKAPKLLIYAASSLQSGVPSRFSGSGSGTDFTLTISSLQPEDFATYYCQSYDNSQTLDVFGGGTKVEIK

SEQ ID NO: 1391 - protein, 108 aa, Artificial Sequence
  Description of Artificial Sequence: Synthetic polypeptide
DIQMTQSPSSLSASVGDRVTITCRASQDVSSYLTWYQQKPGKEPKLLIYAASSLQSGVPSRFSGSGSGTDFTLTISSLQPEDFATYYCSSYDSSPPWVFGGGTKVEIK

SEQ ID NO: 1392 - protein, 109 aa, Artificial Sequence
  Description of Artificial Sequence: Synthetic polypeptide
DIQMTQSPSSLSASVGDRVTITCRASQDISKYLDWYQQNPGKAPKLLIYAASSLQSGVPSRFSGSGSGTDFTLTISSLQPEDFATYYCPAWDYSSNDGVFGGGTKVEIK

SEQ ID NO: 1393 - protein, 109 aa, Artificial Sequence
  Description of Artificial Sequence: Synthetic polypeptide
DIQMTQSPSSLSASVGDRVTITCRASQAVSNYLNWYQQKPGKAPKLLIYAASSLQSGVPSRFSGSGSGTDFTLTISSLQPEDFATYYCQSYDNSVTTSVFGGGTKVEIK

SEQ ID NO: 1394 - protein, 109 aa, Artificial Sequence
  Description of Artificial Sequence: Synthetic polypeptide
DIQITQSPSSLSASVGDRVTITCRASQSVSKYLHWYQQKPGKAPKLLIYAASSLQSGVPSRFSGSGSGTDFTLTISSLQPEDFATYYCQSWDSSGHNAVFGGGTKVEIK

SEQ ID NO: 1395 - protein, 109 aa, Artificial Sequence
  Description of Artificial Sequence: Synthetic polypeptide
DIQMTQSPSSLSASVGDRVTITCRASQAISKYLHWYQQKPGKAPKLLIYAASSLQSGVPSRFSGSGSGTDFTLTISSLQPEDFATYYCEAYDNSVSQDVFGGGTKVEIK

SEQ ID NO: 1396 - protein, 108 aa, Artificial Sequence
  Description of Artificial Sequence: Synthetic polypeptide
DIQMTQSPSSLSASVGDRVTITCRASQAVSSYLAWYQQKPGKAPKLLIYAASSLQSGVPSRFSGSGSGTDFTLTISSLQPEDFATYYCSSYASSTPYVFGGGTKVEIK

SEQ ID NO: 1397 - protein, 108 aa, Artificial Sequence
  Description of Artificial Sequence: Synthetic polypeptide
DIQMTQSPSSLSASVGDRVTITCRASQDISRYLDWYQQKPGKAPKLLIYAASSLQSGVPSRFSGSGSGTDFTLTISSLQPEDFATYYCQPYDGSYPWAFGGGTKVEIK

SEQ ID NO: 1398 - protein, 108 aa, Artificial Sequence
  Description of Artificial Sequence: Synthetic polypeptide
DIQMTQSPSSLPASVGDRVTITCRASQAVSNYLDWYQQKPGKAPKLLIYAASSLQSGVPSRFSGSGSGTDFTLTISSLQPEDFATYYCSSYDSSHPLAFGGGTKVEIK

SEQ ID NO: 1399 - protein, 108 aa, Artificial Sequence
  Description of Artificial Sequence: Synthetic polypeptide
DIQMTQSPSSLSASVGDRVTITCRASQDISRYLAWYQQKPGKAPKLLIYAASSLQSGVPSRFSGSGSGTDFTLTISSLQPEDFATYYCQAYDGSPPGVFGGGTKVEIK

SEQ ID NO: 1400 - protein, 108 aa, Artificial Sequence
  Description of Artificial Sequence: Synthetic polypeptide
DIQMTQSPSSLSASVGDRVTITCRASQDISTYLAWYQQKPGKAPKLLIYAASSLQSGVPSRFSGSGSGTDFTLTISSLQPEDFATYYCSSYASSPSWAFGGGTKVEIK

SEQ ID NO: 1401 - protein, 108 aa, Artificial Sequence
  Description of Artificial Sequence: Synthetic polypeptide
DIQMTQSPSSLSASVGDRVTITCRASQAVSSYLNWYQQKPGKAPKLLIYAASSLQSGVPSRFSGSGSGTDFTLTISSLQPDDFATYYCSSYNSSTPGMFGGGTKVEIK

SEQ ID NO: 1402 - protein, 108 aa, Artificial Sequence
  Description of Artificial Sequence: Synthetic polypeptide
DFQMTQSPSSLSASVGDRVTITCRASQAVSNYLTWYQQKPGKAPKLLIYAASSLQSGVPSRFSGSGSGTDFTLTISSLQPEDFATYYCQVWDGSSPLVFGGGTKVEIK

SEQ ID NO: 1403 - protein, 109 aa, Artificial Sequence
  Description of Artificial Sequence: Synthetic polypeptide
DIQITQSPSSLSASVGDRVTIACRASQDVSSYLDWYQQKPGKAPKLLIYAASSLQSGVPSRFSGSGSGTDFTLTISSLQPEDFATYYCQSYDSSVYPAVFGGGTKVEIK

SEQ ID NO: 1404 - protein, 109 aa, Artificial Sequence
  Description of Artificial Sequence: Synthetic polypeptide
DIQMTQSPSSLSASVGDRVTITCRASQDISRYLTWYQQKPGKAPKLLIYAASSLQSGVPSRFSGSGSGTDFTLTISSLQPEDFATYYCQSYDNSGDGYVFGGGTKVEIK

SEQ ID NO: 1405 - protein, 108 aa, Artificial Sequence
  Description of Artificial Sequence: Synthetic polypeptide
DIQMTQSPSSLSASVGDRVTITCRASQDVSRYLAWYQQKPGKAPKLLIYAASSLQSGVPSRFSGSGSGTDFTLTISSLQPEDFATYYCQSYDGSPTVMFGGGTKVEIK

SEQ ID NO: 1406 - protein, 109 aa, Artificial Sequence
  Description of Artificial Sequence: Synthetic polypeptide
DIQMTQSPSSLSASVGDRVTITCRASQDVSTYLNWYQQKPGKAPKLLIYAASSLQSGVPSRFSGSGSGTDFTLTISSLQPEDFATYYCEAWDYSLSAYVFGGGTKVEIK

SEQ ID NO: 1407 - protein, 109 aa, Artificial Sequence
  Description of Artificial Sequence: Synthetic polypeptide
DIQMTQSPSSLSASVGDRVTITCRASQYVSTYLDWYQQKPGKAPKLLIYAASSLQSGVPSRFSGSGSGTDFTLTISSLQPEDFATYYCQSWDSSVNLVVFGGGTKVEIK

SEQ ID NO: 1408 - protein, 109 aa, Artificial Sequence
  Description of Artificial Sequence: Synthetic polypeptide
DIQMTQSPSSLSASVGDRVTITCRASQDVSRYPDWYQQKPGKAPKLLIYAASSLQSGVPSRFSGSGSGTDFTLTISSLQPEDFATYYCQSWDNSLPAVVFGGGTKVEIK

SEQ ID NO: 1409 - protein, 109 aa, Artificial Sequence
  Description of Artificial Sequence: Synthetic polypeptide
DIQMTQSPSSLSASVGDRVTITCRASQAVSRYLDWYQQKPGKAPKLLIYAASSLQSGVPSRFSGSGSGTDFTLTISSLQPEDFATYYCQSYDSSGTIYVFGGGTKVEIK

SEQ ID NO: 1410 - protein, 109 aa, Artificial Sequence
  Description of Artificial Sequence: Synthetic polypeptide
DIQMTQSPSSLSASVGDRVTITCRASQAVSSYLAWYQQKPGKAPKLLIYAASSLQSGVPSRFSGSGSGTDFTLTISSLQPEDFATYYCQSWDASLGDYVFGGGTKVEIK

SEQ ID NO: 1411 - protein, 109 aa, Artificial Sequence
  Description of Artificial Sequence: Synthetic polypeptide
DIQMTQSPSSLSASVGDRVTITCRASQAISSYLAWYQQKPGKAPKLLIYAASSLQSGVPSRFSGSGSGTDFTLTISSLQPEDFATYYCQSWDNSRDHDVFGGGTKVEIK

SEQ ID NO: 1412 - protein, 108 aa, Artificial Sequence
  Description of Artificial Sequence: Synthetic polypeptide
DIQMTQSPSSLSASVGDRVTITCRASQYISRYLTWYQQKPGKAPKLLIYAASSLQSGVPSRFSGSGSGTDFTLTISSLQPEDFATYYCSSYASSHPLVFGGGTKVEIK

SEQ ID NO: 1413 - protein, 109 aa, Artificial Sequence
  Description of Artificial Sequence: Synthetic polypeptide
DIQMTQSPSSLSASVGDRVTITCRASQDISRYLTWYQQKPGKAPKLLIYAASSLQSGVPSRFSGSGSGTDFTLTISSLQPEDFATYYCEAWDDSSDPGVFGGGTKVEIK

SEQ ID NO: 1414 - protein, 108 aa, Artificial Sequence
  Description of Artificial Sequence: Synthetic polypeptide
DIQMTQSPSSLSASVGDRVTITCRASQAVSRYLNWYQQKPGKAPKLLIYAASSLQSGVPSRFSGSGSGTDFTLTISSLQPEDFATYYCQVWDGSSPLAFGGGTKVEIK

SEQ ID NO: 1415 - protein, 109 aa, Artificial Sequence
  Description of Artificial Sequence: Synthetic polypeptide
DIQMTQSPSSLSASVGDRVTITCRASQDISKYLNWYQQKPGKAPKLLIYAASSLQSGVPSRFSGSGSGTDFTLTISSLQPEDFATYYCQSYDNSRDQVVFGGGTKVEIK

SEQ ID NO: 1416 - protein, 109 aa, Artificial Sequence
  Description of Artificial Sequence: Synthetic polypeptide
DIQMTQSPSSLSASVGDRVTITCRASQAVSSYLDWYQQKPGKAPKLLIYAASSLQSGVPSRFSGSGSGTDFTLTISSLQPEDFATYYCQLWDDSVTHVVFGGGTKVEIK

SEQ ID NO: 1417 - protein, 109 aa, Artificial Sequence
  Description of Artificial Sequence: Synthetic polypeptide
DIQMTQSPSSLSASVGDRVTITCRASQAISNYLHWYQQKPGKAPKLLIYAASSLQSGVPSRFSGSGSGTDFTLTISSLQPEDFATYYCQAYDYSSGGLVFGGGTKVEIK

SEQ ID NO: 1418 - protein, 109 aa, Artificial Sequence
  Description of Artificial Sequence: Synthetic polypeptide
DIQMTQSPSSLSASVGDRVTITCRASQAVSRYLDWYQQKPGKAPKLLIYAASSLQSGVPSRFSGSGSGTDFTLTISSLQPEDFATYYCQSWDNSLSSHVFGGGTKVEIK

SEQ ID NO: 1419 - protein, 109 aa, Artificial Sequence
  Description of Artificial Sequence: Synthetic polypeptide
DIQMTQSPSSLSASVGDRVTITCRASQAISRYLAWYQQKPGKAPKLLIYAASSLQSGVPSRFSGSGSGTDFTLTISSLQPEDFATYYCSSYDSSSGGGVFGGGTKVEIK

SEQ ID NO: 1420 - protein, 109 aa, Artificial Sequence
  Description of Artificial Sequence: Synthetic polypeptide
DIQMTQSPSSLSASVGDRVTITCRASQAISKYLAWYQQKPGKAPKLLIYAASSLQSGVPSRFSGSGSGTDFTLTISSLQPEDFATYYCQSWDSSATDYVFGGGTKVEIK

SEQ ID NO: 1421 - protein, 109 aa, Artificial Sequence
  Description of Artificial Sequence: Synthetic polypeptide
DIQMTQSPSSLSASVGDRVTITCRASQSVSKYLNWYQQKPGKAPKLLIYAASSLQSGVPSRFSGSGSGTDFTLTISSLQPEDFATYYCQSYDSSLNHVVFGGGTKVEIK

SEQ ID NO: 1422 - protein, 106 aa, Artificial Sequence
  Description of Artificial Sequence: Synthetic polypeptide
DIQMTQSPSSLSASVGDRVTITCRASQDVSTYLAWYQQKPGKAPKLLIYAASSLQSGVPSRFSGSGSGTDFTLTISSLQPEDFATYYCQQYSSFPTFGGGTKVEIK

SEQ ID NO: 1423 - protein, 108 aa, Artificial Sequence
  Description of Artificial Sequence: Synthetic polypeptide
DIQMTQSPSSLSASVGDRVTITCRASQYVSKYLAWYQQKPGKAPKLLIYAASSLQSGVPSRFSGSGSGTDFTLTISSLQPEDFATYYCQSYDGSPTLAFGGGTKVEIK

SEQ ID NO: 1424 - protein, 108 aa, Artificial Sequence
  Description of Artificial Sequence: Synthetic polypeptide
DIQMTQSPSSLSASVGDRVTITCRASQAVSKYLPWYQQKPGKAPKLLIYAASSLQSGVPSRFSGSGSGTDFTLTISSLQPEDFATYYCQSYDSSPPWAFGGGTKVEIK

SEQ ID NO: 1425 - protein, 108 aa, Artificial Sequence
  Description of Artificial Sequence: Synthetic polypeptide
DIQMTQSPSSLSASVGDRVTITCRASQDISKYLAWYQQKPGKAPKLLIYAASSLQSGVPSRFSGSGSGTDFTLTISSLQPEDFATYYCQQYDSSTSGMFGGGTKVEIK

SEQ ID NO: 1426 - protein, 108 aa, Artificial Sequence
  Description of Artificial Sequence: Synthetic polypeptide
DIQMTQSPSSLSASVGDRVTITCRASQSVSKYLHWYQQKPGKAPKLLIYAASSLQSGVPSRFPGSGSGTDFTLTISSLQPEDFATYYCSLYNSSHPWVFGGGTKVEIK

SEQ ID NO: 1427 - protein, 109 aa, Artificial Sequence
  Description of Artificial Sequence: Synthetic polypeptide
DIQMTQSPSSLSASVGDRVTITCRASQAVSTYLAWYQQKPGKAPKLLIYAASSLQSGVPSRFSGSGSGTDFTLTISSLQPEDFATYYCQSYDSSLAADVFGGGTKVEIK

SEQ ID NO: 1428 - protein, 108 aa, Artificial Sequence
  Description of Artificial Sequence: Synthetic polypeptide
DIQMTQSPSSLSASVGDRVTITCRASQAVSRYLTWYQQKPGKAPKLLIYAASSLQSGVPSRFSGSGSGTDFTLTISSLQPEDFATYYCSSYASSPSYAFGGGTKVEIK

SEQ ID NO: 1429 - protein, 109 aa, Artificial Sequence
  Description of Artificial Sequence: Synthetic polypeptide
DIQMTQSPSSLSASVGDRVTITCRASQAVSRYLAWYQQKPGKAPKLLIYAASSLQSGVPSRFSGSGSGTDFTLTISSLQPEDFATYYCEAYDDSSGDYVFGGGTKVEIK

SEQ ID NO: 1430 - protein, 109 aa, Artificial Sequence
  Description of Artificial Sequence: Synthetic polypeptide
DIQMTQSPSSLSASVGDRVTITCRASQDVSRYLAWYQQKPGKAPKLLIYAASSLQSGVPSRFSGSGSGTDFTLTISSLRPEDFATYYCQSYDNSGTIYVFGGGTKVEIK

SEQ ID NO: 1431 - protein, 109 aa, Artificial Sequence
  Description of Artificial Sequence: Synthetic polypeptide
DIQMTQSPSSLSASVGDRVTITCRASQDVSRYLAWYQQKPGKAPKLLIYAASSLQSGVPSRFSGSGSGTDFTLTISSLQPEDFATYYCQAYDYSSGHYVFGGGTKVEIK

SEQ ID NO: 1432 - protein, 109 aa, Artificial Sequence
  Description of Artificial Sequence: Synthetic polypeptide
DIQMTQSPSSLSASVGDRVTITCRASQAVSSYLAWYQQKPGKAPKLLIYAASSLQSGVPSRFSGSGSGTDFTLTISSLQPEDFATYYCEAWDYSSSAGVFGGGTKVEIK

SEQ ID NO: 1433 - protein, 108 aa, Artificial Sequence
  Description of Artificial Sequence: Synthetic polypeptide
DIQMTQSPSSLSASVGDRVTITCRASQAVSTYLNWYQQKPGKAPKLLIYAASSLQSGVPSRFSGSGSGTDFTLTISSLQPEDFATYYCSQYASSPPGVFGGGTKVEIK

SEQ ID NO: 1434 - protein, 108 aa, Artificial Sequence
  Description of Artificial Sequence: Synthetic polypeptide
DIQMTQSPSSLSASVGDRVTITCRASQAVSTYLAWYQQKPGKAPKLLIYAASSLQSGVPSRFSGSGSGTDFTLTISSLQPEDFATYYCEAYDSSPSVAFGGGTKVEIK

SEQ ID NO: 1435 - protein, 109 aa, Artificial Sequence
  Description of Artificial Sequence: Synthetic polypeptide
DIQMTQSPSSLSASVGDRVTITCRASQDISTYLDWYQQKPGKAPKLLIYAASSLQSGVPSRFSGSGSGTDFTLTISSLQPEDFATYYCQSWDSSAYHYVFGGGTKVEIK

SEQ ID NO: 1436 - protein, 108 aa, Artificial Sequence
  Description of Artificial Sequence: Synthetic polypeptide
DIQMTQSPSSLSASVGDRVTITCRASQDISKYLNWYQQKPGKAPKLLIYAASSLQSGVPSRFSGSGSGTDFTLTISSLQPEDFATYYCQSYASSTSLVFGGGTKVEIK

SEQ ID NO: 1437 - protein, 108 aa, Artificial Sequence
  Description of Artificial Sequence: Synthetic polypeptide
DIQMTQSPSSLSASVGDRVTITCRASQDVSKYLDWYQQKPGKAPKLLIYAASSLQSGVPSRFSGSGSGTDFTLTISSLQPEDFATYYCPQYDSSNPGVFGGGTKVEIK

SEQ ID NO: 1438 - protein, 109 aa, Artificial Sequence
  Description of Artificial Sequence: Synthetic polypeptide
DIQMTQSPSSLSASVGDRVTITCRASQDISSYLNWYQQKPGKAPKLLIYAASSLQSGVPSRFSGSGSGTDFTLTISSLQPEDFATYYCQSWDNSVSRDVFGGGTKVEIK

SEQ ID NO: 1439 - protein, 108 aa, Artificial Sequence
  Description of Artificial Sequence: Synthetic polypeptide
IQMTQSPSSLSASVGDRVTITCRASQDVSSYLDWYQQKPGKAPKLLIYAASSLQSGVPSRFSGSGSGTDFTLTISSLQPEDFATYYCEAWDDSLSDWVFGGGTKVEIK

SEQ ID NO: 1440 - protein, 108 aa, Artificial Sequence
  Description of Artificial Sequence: Synthetic polypeptide
DIQMTQSPSSLSASVGDRVTITCRASQSVSSYLHWYQQKPGKAPKLLIYAASSLQSGVPSRFSGSGSGTDFTLTISSLQPEDFATYYCSPYASSNSGVFGGGTKVEIK

SEQ ID NO: 1441 - protein, 107 aa, Artificial Sequence
  Description of Artificial Sequence: Synthetic polypeptide
IQMTQSPSSLSASVGDRVTITCRASQAISTYLDWYQQKPGKAPKLLIYAASSLQSGVPSRFSGSGSGTDFTLTISSLQPEDFATYYCPSYDSSPSFVFGGGTKVEIK

SEQ ID NO: 1442 - protein, 108 aa, Artificial Sequence
  Description of Artificial Sequence: Synthetic polypeptide
DIQMTQSPSSLSASVGDRVTITCRASQAVSNYLNWYQQKPGKAPKLLIYAASSLQSGVPSRFSGSGSGTDFTLTISSLQPEDFATYYCSSYDSSTPGVFGGGTKVEIK

SEQ ID NO: 1443 - protein, 109 aa, Artificial Sequence
  Description of Artificial Sequence: Synthetic polypeptide
DIQMTQSPSSLSASVGDRVTITCRASQYVSTYLHWYQQKPGKAPKLLIYAASSLQSGVPSRFSGSGSGTDFTLTISSLQPEDFATYYCAAYDSSLGGGVFGGGTKVEIK

SEQ ID NO: 1444 - protein, 109 aa, Artificial Sequence
  Description of Artificial Sequence: Synthetic polypeptide
DIQMTQSPSSLSASVGDRVTITCRASQDVSTYLTWYQQKPGKAPKLLIYAASSLQSGVPSRFSGSGSGTDFTLTISSLQPEDFATYYCQSYDSSPDIFVFGGGTKVEIK

SEQ ID NO: 1445 - protein, 109 aa, Artificial Sequence
  Description of Artificial Sequence: Synthetic polypeptide
DIQMTQSPSSLSASVGDRVTITCRASQSISSYLNWYQQKPGKAPKLLIYAASSLQSGVPSRFSGSGSGTDFTLTISSLQPEDFATYYCAAWDASLSAYVFGGGTKVEIK

SEQ ID NO: 1446 - protein, 108 aa, Artificial Sequence
  Description of Artificial Sequence: Synthetic polypeptide
DIQMTQSPSSLSASVGDRVTITCRASQAISKYLAWYQQKPGKAPKLLIYAASSLQSGVPSRFSGSGSGTDFTLTISSLQPEDFATYYCSQYDSSHPLVFGGGTKVEIK

SEQ ID NO: 1447 - protein, 107 aa, Artificial Sequence
  Description of Artificial Sequence: Synthetic polypeptide
DIQMTQSPSSLSASVGDRVTITCRASQAVSRYLHWYQQKPGKAPKLLIYAASSLQSGVPSRFSGSGSGTDFTLTISSLQPEDFATYYCQQGHSGPYTFGGGTKVEIK

SEQ ID NO: 1448 - protein, 108 aa, Artificial Sequence
  Description of Artificial Sequence: Synthetic polypeptide
DIQMTQSPSSLSASVGDRVTITCRASQYVSKYLNWYQQKPGKAPKLLIYAASSLQSGVPSRFSGSGSGTDFTLTISSLQPEDFATYYCSSYDSSTPFAFGGGTKVEIK

SEQ ID NO: 1449 - protein, 109 aa, Artificial Sequence
  Description of Artificial Sequence: Synthetic polypeptide
DIQMTQSPSSLSASVGDRVTITCRASQSVSNYLNWYQQKPGKAPKLLIYAASSLQSGVPSRFSGSGSGTDFTLTISSLQPEDFATYYCAAWDSSSSPLVFGGGTKVEIK

SEQ ID NO: 1450 - protein, 109 aa, Artificial Sequence
  Description of Artificial Sequence: Synthetic polypeptide
DIQMTQSPSSLSASVGDRVTITCRASQDVSRYLPWYQQKPGKAPKLLIYAASSLQSGVPSRFSGSGSGTDFTLTISSLQPEDFATYYCQSYDYSLDAYVFGGGTKVEIK

SEQ ID NO: 1451 - protein, 109 aa, Artificial Sequence
  Description of Artificial Sequence: Synthetic polypeptide
DIQMTQSPSSLSASVGDRVTITCRASQDVSKYLHWYQQKPGKAPKLLIYAASSLQSGVPSRFSGSGSGTDFTLTISSLQPEDFATYYCQAWEDSSGDGVFGGGTKVEIK

SEQ ID NO: 1452 - protein, 108 aa, Artificial Sequence
  Description of Artificial Sequence: Synthetic polypeptide
DIQMTQSPSSLSASVGDRVTITCRASQSISSYLDWYQQKPGKAPKLLIYAASSLQSGVPSRFSGSGSGTDFTLTISSLQPEDFATYYCQPYDSSTPFVFGGGTKVEIK

SEQ ID NO: 1453 - protein, 107 aa, Artificial Sequence
  Description of Artificial Sequence: Synthetic polypeptide
DIQMTQSPSSLSASVGDRVTITCRASQDVSTYLAWYQQKPGKAPKLLIYAASSLQSGVPSRFSGSGSGTDFTLTISSLQPEDFATYYCQQGGSVPRTFGGGTKVEIK

SEQ ID NO: 1454 - protein, 108 aa, Artificial Sequence
  Description of Artificial Sequence: Synthetic polypeptide
DIQMTQSPSSLSASVGDRVTITCRASQAVSKYLAWYQQKPGKAPKLLIYAASSLQSGVPSRFSGSGSGTDFTLTISSLQPEDFATYYCSQYTSSTSLAFGGGTKVEIK

SEQ ID NO: 1455 - protein, 109 aa, Artificial Sequence
  Description of Artificial Sequence: Synthetic polypeptide
TIQMTQSPSSLSASVGDRVTITCRASQAVSTYLPWYQQKPGKAPKLLIYAASSLQSGVPSRFSGSGSGTDFTLTISSLQPEDFATYYCESWDSSLTHVVFGGGTKVEIK

SEQ ID NO: 1456 - protein, 108 aa, Artificial Sequence
  Description of Artificial Sequence: Synthetic polypeptide
DIQMTQSPSSLSASVGDRVTITCRASQYISRYLAWYQQKPGKAPKLLIYAASSLQSGVPSRFSGSGSGTDFTLTISSLQPEDFATYYCPPYDSSPSYVFGGGTKVEIK

SEQ ID NO: 1457 - protein, 109 aa, Artificial Sequence
  Description of Artificial Sequence: Synthetic polypeptide
DIQMTQSPSSLSASVGDRVTITCRASQAVSTYLDWYQQKPGKAPKLLIYAASSLQSGVPSRFSGSGSGTDFTLTISSLQPEDFATYYCQAWDDSSGDWVFGGGTKVEIK

SEQ ID NO: 1458 - protein, 108 aa, Artificial Sequence
  Description of Artificial Sequence: Synthetic polypeptide
DIQMTQSPSSLSASVGDRVTITCRASQAVSRYLHWYQQKPGKAPKLLIYAASSLQSGVPSRFSGSGSGTDFTLTISSLQPEDFATYYCQAWDGSYPVVFGGGTKVEIK

SEQ ID NO: 1459 - protein, 109 aa, Artificial Sequence
  Description of Artificial Sequence: Synthetic polypeptide
DIQMTQSPSSLSASVGDRVTITCRASQSVSSYLAWYQQKPGKAPKLLIYAASSLQSGVPSRFSGSGSGTDFTLTISSLQPEDFATYYCEAYDDSLGGVVFGGGTKVEIK

SEQ ID NO: 1460 - protein, 109 aa, Artificial Sequence
  Description of Artificial Sequence: Synthetic polypeptide
DIQMTQSPSSLSASVGDRVTITCRASQDVSTYLAWYQQKPGKAPKLLIYAASSLQSGVPSRFSGSGSGTDFTLTISSLQPEDFATYYCAAWDSSLSHLVFGGGTKVEIK

SEQ ID NO: 1461 - protein, 109 aa, Artificial Sequence
  Description of Artificial Sequence: Synthetic polypeptide
DIQMTQSPSSLSASVGDRVTITCRASQAVSRYLAWYQQKPGKAPKLLIYAASSLQSGVPSRFSGSGSGTDFTLTISSLQPEDFATYYCQSWDSSSYPDVFGGGTKVEIK

SEQ ID NO: 1462 - protein, 109 aa, Artificial Sequence
  Description of Artificial Sequence: Synthetic polypeptide
DIQMTQSPSSLSASVGDRVTITCRASQAVSSYLDWYQQKPGKAPKLLIYAASSLQSGVPSRFSGSGSGTDFTLTISSLQPEDFATYYCQSWDNSLTRDVFGGGTKVEIK

SEQ ID NO: 1463 - protein, 109 aa, Artificial Sequence
  Description of Artificial Sequence: Synthetic polypeptide
DIQMTQSPSSLSASVGDRVTITCRASQDVSTYLNWYQQKPGKAPKLLIYAASSLQSGVPSRFSGSGSGTDFTLTISSLQPEDFATYYCQSWDSSLTNSVFGGGTKVEIK

SEQ ID NO: 1464 - protein, 107 aa, Artificial Sequence
  Description of Artificial Sequence: Synthetic polypeptide
DIQMTQSPSSLSASVGDRVTITCRASQAVSSYLTWYQQKPGKAPKLLIYAASSLQSGVPSRFSGSGSGTDFTLTISSLQPEDFATYYCQQGSSGPSTFGGGTKVEIK

SEQ ID NO: 1465 - protein, 107 aa, Artificial Sequence
  Description of Artificial Sequence: Synthetic polypeptide
DIQMTQSPSSLSASVGDRVTITCRASQYVSRYLHWYQQKPGKAPKLLIYAASSLQSGVPSRFSGSGSGTDFTLTISSLQPEDFATYYCQQSNSSPHTFGGGTKVEIK

SEQ ID NO: 1466 - protein, 109 aa, Artificial Sequence
  Description of Artificial Sequence: Synthetic polypeptide
DIQMTQSPSSLSASVGDRVTITCRASQAVSTYLAWYQQKPGKAPKLLIYAASSLQSGVPSRFSGSGSGTDFTLTISSLQPEDFATYYCAAWDDSSPPWAFGGGTKVEIK

SEQ ID NO: 1467 - protein, 108 aa, Artificial Sequence
  Description of Artificial Sequence: Synthetic polypeptide
TIQMTQSPSSLSASVGDRVTITCRASQAVSTYLAWYQQKPGKAPKLLIYAASSLQSGVPSRFSGSGSGTDFTLTISSLQPEDFATYYCSSYASSPSVVFGGGTKVEIK

SEQ ID NO: 1468 - protein, 108 aa, Artificial Sequence
  Description of Artificial Sequence: Synthetic polypeptide
DIQMTQSPSSLSASVGDRVTITCRASQYVSSYLAWYQQKPGKAPKLLIYAASSLQSGVPSRFSGSGSGTDFTLTISSLQPEDLATYYCSPYASSPPLVFGGGTKVEIK

SEQ ID NO: 1469 - protein, 108 aa, Artificial Sequence
  Description of Artificial Sequence: Synthetic polypeptide
DIQMTQSPSSLSASVGDRVTITCRASQAVSRYLTWYQQKPGKAPKLLIYAASSLQSGVPSRFSGSGSGTDFTLTISSLQPEDFATYYCSSYDSSHTFVFGGGTKVEIK

SEQ ID NO: 1470 - protein, 109 aa, Artificial Sequence
  Description of Artificial Sequence: Synthetic polypeptide
DIQMTQSPSSLSASVGDRVTITCRASQTVSRYLDWYQQKPGKAPKLLIYAASSLQSGVPSRFSGSGSGTDFTLTISSLQPEDFATYYCQSWDSSVTSDVFGGGTKVEIK

SEQ ID NO: 1471 - protein, 109 aa, Artificial Sequence
  Description of Artificial Sequence: Synthetic polypeptide
DIQMTQSPSSLSASVGDRVTITCRASQYISTYLNWYQQKPGKAPKLLIYAASSLQSGVPSRFSGSGSGTDFTLTISSLQPEDFATYYCQSWDSSVTRYVFGGGTKVEIK

SEQ ID NO: 1472 - protein, 109 aa, Artificial Sequence
  Description of Artificial Sequence: Synthetic polypeptide
DIQMTQSPSSLSASVGDRVTITCHASQDISRYLNWYQQKPGKAPKLLIYAASSLQSGVPSRFSGSGSGTDFTLTTSSLQPEDFATYYCQSYDSSRSDAVFGGGTKVEIK

SEQ ID NO: 1473 - protein, 108 aa, Artificial Sequence
  Description of Artificial Sequence: Synthetic polypeptide
DIQMTQSPSSLSASVGDRVTITCRASQSVSRYLTWYQQKPGKAPKLLIYAASSLQSGVPSRFSGSGSGTDFTLTISSLQPEDFATYYCQSYDSSTSVVFGGGTKVEIK

SEQ ID NO: 1474 - protein, 108 aa, Artificial Sequence
  Description of Artificial Sequence: Synthetic polypeptide
DIQMTQSPSSLSASVGDRVTITCRASQSVSRYLDWYQQKPGKAPKLLIYAASSLQSGVPSRFSGSGSGTDFTLTISSLQPEDFATYYCSSYNSSPPGTFGGGTKVEIK

SEQ ID NO: 1475 - protein, 109 aa, Artificial Sequence
  Description of Artificial Sequence: Synthetic polypeptide
DIQMTQSPSSLSASVGDRVTITCRASQAVSRYLTWYQQKPGKAPKLLIYAASSLQSGVPPRFSGSGSGTDFTLTISSLQPEDFATYYCEAWDASSNSYMFGGGTKVEIK

SEQ ID NO: 1476 - protein, 106 aa, Artificial Sequence
  Description of Artificial Sequence: Synthetic polypeptide
DIQMTQSPSSLSASVGDRVTITCRASQDVSRYLNGYQQKPGKAPKLLIYAASSLQSGVPSRFSGSGSGTDFTLTISSLQPEDFATYYCQQSNSHYTFGGGTKVEIK

SEQ ID NO: 1477 - protein, 108 aa, Artificial Sequence
  Description of Artificial Sequence: Synthetic polypeptide
DIQMTQSPSSLSASVGDRVTITCRASQDVSRYLNWYQQKPGKAPKLLIYAASSLQSGVPSRFSGSGSGTDFTLTISSLQPEDFATYYCEAWDGSPTVAFGGGTKVEIK

SEQ ID NO: 1478 - protein, 109 aa, Artificial Sequence
  Description of Artificial Sequence: Synthetic polypeptide
DIQMTQSPSSLSASVGDRVTITCRASQDVSNYLAWYQQKPGKAPKLLIYAASSLQSGVPSRFSGSGSGTDFTLTISSLQPEDFATYYCAAYDASLGNWVFGGGTKVEIK

SEQ ID NO: 1479 - protein, 106 aa, Artificial Sequence
  Description of Artificial Sequence: Synthetic polypeptide
DIQMTQSPSSLSASVGDRVTITCRASQYVSSYLTWYQQKPGKAPKLLITPSSLQSGVPSRFSGSGSGTDFTLTISSLQPEDFATYYCEAYDSSPLAFGGGTKVEIK

SEQ ID NO: 1480 - protein, 109 aa, Artificial Sequence
  Description of Artificial Sequence: Synthetic polypeptide
DIQMTQSPSSLSASVGDRVTITCRASQYVSRYLAWYQQKPGKAPKLLIYAASSLQSGVPSRFSGSGSGTDFTLTISSLQPEDFATYYCQSYDNSGAGVVFGGGTKVEIK

SEQ ID NO: 1481 - protein, 118 aa, Artificial Sequence
  Description of Artificial Sequence: Synthetic polypeptide
EVQLLESGGGLVQPGGSLRLSCKASGYTFSSYWMSWVRQAPGKGLEWIGSIYYSGSTYYNPSLKSRVTISRDNSKNTLYLQMNSLRAEDTAVYYCARDAYYSYALDYWGQGMLVTVSS

SEQ ID NO: 1482 - protein, 118 aa, Artificial Sequence
  Description of Artificial Sequence: Synthetic polypeptide
EVQLLESGGGLVQPGGSLRLSCKASGYTFTSYSMRWVRQAPGKGLEWIGWINPNSGGTKYNEKFKGRATISRDNSKNTLYLQMNSLRAEDTAVYYCARYYYGGAFDYWGQGTLVTVSS

SEQ ID NO: 1483 - protein, 118 aa, Artificial Sequence
  Description of Artificial Sequence: Synthetic polypeptide
EVQLLESGGGLVQPGGSLRLSCKASGFTFSSYSMRWVRQAPGKGLEWIGWINPGSGSTNYAQKFKGRATISRDNSKNTLYLQMNSLRAEDTAVYYCARYYYGGYFDYWGQGTLVTVSS

SEQ ID NO: 1484 - protein, 118 aa, Artificial Sequence
  Description of Artificial Sequence: Synthetic polypeptide
EVQLLESGGGLVQPGGSLRLSCKASGFTFTYYWMSWVRQAPGKGLEWIGDIYHSGSTYYNPSLKSRVTISRDNSKNTLYLQMNSLRAEDTAVYYCARDGYGSYALDYWGQGTLVTVSS

SEQ ID NO: 1485 - protein, 117 aa, Artificial Sequence
  Description of Artificial Sequence: Synthetic polypeptide
EVQLLESGGGLVQPGGSLRLSCKASGYTFTSYAMYWVRQAPGKGLEWIGAIYHSGSTNYNPSLKSRVTISRDNSKNTLYLQMNSLRAEDTAVYYCARYYYGGDFAYWGQGTLVTVSS

SEQ ID NO: 1486 - protein, 118 aa, Artificial Sequence
  Description of Artificial Sequence: Synthetic polypeptide
EVQLLESGGGLVQPGGSLRLSCKASGFTFTYYWMNWVRQAPGKGLEWIGAIYHSGSTYYNPSLKSRVTISRDNSKNTLYLQMNSLRAEDTAVYYCARDGYYGYAMDYWGQGTLVTVSS

SEQ ID NO: 1487 - protein, 117 aa, Artificial Sequence
  Description of Artificial Sequence: Synthetic polypeptide
EVQLLESGGGLVQPGGSLRLSCKASGYTFTSYYMPWVRQAPGKGLEWIGVINHSGSTNYNPSLKSRVTISRDNSKNTLYLQMNSLRAEDTAVYYCARDHYYSYFDYWGQGTLVTVSS

SEQ ID NO: 1488 - protein, 118 aa, Artificial Sequence
  Description of Artificial Sequence: Synthetic polypeptide
EVQLLESGGGLVQPGGSLRLSCKASGFTFTSYSMHWVRQAPGKGLEWIGWINPGSGSTKYAQKFKGRTIISRDNSKNTLYLQMNSLRAEDTAVYYCARYGYYGGFDYWGQGTLVTVSS

SEQ ID NO: 1489 - protein, 117 aa, Artificial Sequence
  Description of Artificial Sequence: Synthetic polypeptide
EVQLLESGGGLVQPGGSLRLSCKASGYTFTSYAMRWVRQAPGKGLEWIGAITHSGSTYYNPSLKSRVTISRDNSKNTLYLQMNSLRAEDTAVYYCARYYYGGYFDYWGQGTLVTVSS

SEQ ID NO: 1490 - protein, 118 aa, Artificial Sequence
  Description of Artificial Sequence: Synthetic polypeptide
EVQLLESGGGLVQPGGSLRLSCKASGYTFTYYWMSWVRQAPGKGLEWIGSIYHSGSTYYNPSLKSRVTISRDNSKNTLYLQMNSLRAEDTAVYYCARDGYGGYYLDYWGQGTLVTVSS

SEQ ID NO: 1491 - protein, 117 aa, Artificial Sequence
  Description of Artificial Sequence: Synthetic polypeptide
EVQLLESGGGLVQPGGSLRLSCKASGYTFTSYSMNWVRQAPGKGLEWIGWINPNSGSTKYAEKFKGRATISRDNSKNTLYLQMNSLRAEDTAVYYCARGGYYYMDVWGQGTLVTVSS

SEQ ID NO: 1492 - protein, 116 aa, Artificial Sequence
  Description of Artificial Sequence: Synthetic polypeptide
EVQLLESGGGLVQPGGSLRLSCKASGFTFSYYSMYWVRQAPGKGLEWVGRISPGGGGTYYADSFKGRFTISRDNSKNTLYLQMNSLRAEDTAVYYCARGDGGFDYWGQGTLVTVSS

SEQ ID NO: 1493 - protein, 121 aa, Artificial Sequence
  Description of Artificial Sequence: Synthetic polypeptide
EVQLLESGGGLVQPGGSLRLSCKASGFTFSSYAMHWVRQAPGKGLEWIGAITHSGSTNYNPSLKSRVTISRDNSKNTLYLQMNSLRAEDTAVYYCARDIYYSGYYYGMDDWGQGTLVTVSS

SEQ ID NO: 1494 - protein, 118 aa, Artificial Sequence
  Description of Artificial Sequence: Synthetic polypeptide
EVQLLESGGGLVQPGGSLRLSCKASGYTFTSYSMHWVRQAPGKGLEWIGRIDPSNGGTNYNEKFKGKATISRDNSKNTLYLQMNSLRAEDTAVYYCARPDGSYGMDDWVQGTLVTVSS

SEQ ID NO: 1495 - protein, 122 aa, Artificial Sequence
  Description of Artificial Sequence: Synthetic polypeptide
EVQLLESGGGLVQPGGSLRLSCKASGYTFTYYSMSWVRQAPGKGLEWIGDINHSGSTYYNPSLKSRVTISRDNSKNTLYLQMNSLRAEDTAVYYCARVGYYYVSSGYALDYWGQGTLVTVSS

SEQ ID NO: 1496 - protein, 116 aa, Artificial Sequence
  Description of Artificial Sequence: Synthetic polypeptide
EVQLLESGGGLVQPGGSLRLSCKASGFTFTSYWMPWVRQAPGKGLEWIGSIYYSGSTNYNPSLKSRVTISRDNSKNTLYLQMNSLRAEDTAVYYCARGGGYDLDYWGQGTLVTVSS

SEQ ID NO: 1497 - protein, 122 aa, Artificial Sequence
  Description of Artificial Sequence: Synthetic polypeptide
EVQLLESGGGLVQPGGSLRLSCKASGYTFTSYSMRWVRQAPGKGLEWVGRISPSGGGTYYADSFKGRFTISRDNSKNTLYLQMNSLRAEDTAVYYCARDLYINSYYYGMDDWGQGTLVTVSS

SEQ ID NO: 1498 - protein, 122 aa, Artificial Sequence
  Description of Artificial Sequence: Synthetic polypeptide
EVQLLESGGGLVQPGGSLRLSCKASGYTFTSYSMSWVRQAPGKGLEWVGRISPNGGDTYYADSVKGRFTISRDNSKNTLYLQMNSLRAEDTAVYYCARSRYGYYYDYGMDVWGQGTLVTVSS

SEQ ID NO: 1499 - protein, 119 aa, Artificial Sequence
  Description of Artificial Sequence: Synthetic polypeptide
EVQLLESGGGLVQPGGSLRLSCKASGYTFTNYAMHWVRQAPGKGLEWIGWINPGSGGTNYAEKFKGRATISRDNSKNTLYLQMNSLRAEDTAVYYCARYYYGSYGFDDWGQGTLVTVSS

SEQ ID NO: 1500 - protein, 123 aa, Artificial Sequence
  Description of Artificial Sequence: Synthetic polypeptide
EVQLLESGGGLVQPGGSLRLSCKASGYTFSSYSMHWVRQAPGKGLEWVGRISPSGGDTYYADSFKGRFTISRDNSKNTLYLQMNSLRAEDTAVYYCARVGSDRLTVNHPFDSWGQGTLVTVSS

SEQ ID NO: 1501 - protein, 117 aa, Artificial Sequence
  Description of Artificial Sequence: Synthetic polypeptide
EVQLLESGGGLVQPGGSLRLSCKASGFTFSYYYMHWVRQAPGKGLEWIGAITHSGSTNYNPSLKSRVTISRDNSKNTLYLQMNSLRAEDTAVYYCAREGYGSYLDYWGQGTLVTVSS

SEQ ID NO: 1502 - protein, 123 aa, Artificial Sequence
  Description of Artificial Sequence: Synthetic polypeptide
EVQLLESGGGLVQPGGSLRLSCKASGFTFTDYAIHWVRQAPGKGLEWIGWINPGNGGTKYNEKFKGKATISRDNSKNTLYLQMNSLRAEDTAVYYCARVGSDHLTNDQPFDVWGPGTLVTVSS

SEQ ID NO: 1503 - protein, 119 aa, Artificial Sequence
  Description of Artificial Sequence: Synthetic polypeptide
EVQLLESGGGLVQPGGSLRLSCKASGYTFTNYSMHWVRQAPGKGLEWIGRINPGSGSTNYAEKFKGRATISRDNSKNTLYLQMNSLRAEDTAVYYCARSDYYGSWSDYWGQGTLVTVSS

SEQ ID NO: 1504 - protein, 118 aa, Artificial Sequence
  Description of Artificial Sequence: Synthetic polypeptide
EVQLLESGGGLVQPGGSLRLSCKASGYTFSSYYMHWVRQAPGKGLEWVGRINPSGGGTYYADSVKGRFTISRDNSKNTLYLQMNSLRAEDTAVYYCARYYGGYYMDVWGQGTLVTVSS

SEQ ID NO: 1505 - protein, 121 aa, Artificial Sequence
  Description of Artificial Sequence: Synthetic polypeptide
EVQLLESGGGLVQPGGSLRLSCKASGFTFTSYYMHWVRQAPGKGLEWIGDINHSGSTNYNPSLKSRVTISRDNSKNTLYLQMNSLRAEDTAVYYCARDLYNSTYYYAMDFWGQGTLVTVSS

SEQ ID NO: 1506 - protein, 120 aa, Artificial Sequence
  Description of Artificial Sequence: Synthetic polypeptide
RVQLLESGGGLVQPGGSLRLSCKASGYTFSSYSMNWVRQAPGKGLEWIGRINPGSGGTKYNQKFKGRATISRDNSKNTLYLQMNSLRAEDTAVYYCARGGGYGYYGMDDWGQGTLVTVSS

SEQ ID NO: 1507 - protein, 114 aa, Artificial Sequence
  Description of Artificial Sequence: Synthetic polypeptide
EVQLLESGGGLVQPGGSLRLSCKASGFTFTDYSMYWVRQAPGKGLEWIGYIYYSGSTSYNPDLKSRRTIISRDNSKNTLYLQMNSLRAEDTAVYYCAREGLAYWGQGTLVTVSS

SEQ ID NO: 1508 - protein, 118 aa, Artificial Sequence
  Description of Artificial Sequence: Synthetic polypeptide
EVQLLESGGGLVQPGGSLRLSCKASGYTFTSYSMRWVRQAPGKGLEWIGWINPGSGSTNYDEKFKGRATISRDNSKNTLYLQMNSLRAEDTAVYYCARYYYGGAFDFWGQGTLVTVSS

SEQ ID NO: 1509 - protein, 121 aa, Artificial Sequence
  Description of Artificial Sequence: Synthetic polypeptide
EVQLLESGGGLVQPGGSLRLSCKASGFTFSSYAMPWVRQAPGKGLEWIGDIYYSGSTNYNPSLKSRVTISRDNSKNTLYLQMNSLRAEDTAVYYCARSGNYSVYDYGMDDWGQGTLVTVSS

SEQ ID NO: 1510 - protein, 118 aa, Artificial Sequence
  Description of Artificial Sequence: Synthetic polypeptide
EVQLLESGGGLVQPGGSLRLSCKASGYTFTDYWINWVRQAPGKGLEWIGVISHSGSTYYNPSLKSRVTISRDNSKNTLYLQMNSLRAEDTAVYYCARDGYGGYYLDVWGQGTLVTVSS

SEQ ID NO: 1511 - protein, 122 aa, Artificial Sequence
  Description of Artificial Sequence: Synthetic polypeptide
EVQLLESGGGLVQPGGSLRLSCKASGFTFTSYAMHWVRQAPGKGLEWVGRISPGGGATYYADSFKGRFTISRDNSKNTLYLQMNSLRAEDTAVYYCARGGGYSGSYYAMDYWGQGTLVTVSS

SEQ ID NO: 1512 - protein, 122 aa, Artificial Sequence
  Description of Artificial Sequence: Synthetic polypeptide
EVQLLESGGGLVQPGGSLRLSCKASGYTFTNYAMNWVRQAPGKGLEWVGRINPGGGGTYYADSVKGRFTISRDNSKNTLYLQMNSLRAEDTAVYYCARSGIGYDYDYGMDDWGQGTLVTVSS

SEQ ID NO: 1513 - protein, 115 aa, Artificial Sequence
  Description of Artificial Sequence: Synthetic polypeptide
EVQLLESGGGLVQPGGSLRLSCKASGYTFSSYSIHWVRQAPGKGLEWIGSIYHSGSTYYNPSLKSRVTISRDNSKNTLYLQMNSLRAEDTAVYYCARRGSAMDYWGQGTLVTVSS

SEQ ID NO: 1514 - protein, 115 aa, Artificial Sequence
  Description of Artificial Sequence: Synthetic polypeptide
EVQLLESGGGLVQPGGSLRLSCKASGFTFSSYAMHWVRQAPGKGLEWIGDISHSGSTYYNPSLKSRVTISRDNSKNTLYLQMNSLRAEDTAVYYCARRYSGFDDWGQGTLVTVSS

SEQ ID NO: 1515 - protein, 122 aa, Artificial Sequence
  Description of Artificial Sequence: Synthetic polypeptide
EVQLLESGGGLVQPGGSLRLSCKASGFTFSSYGMSWVRQAPGKGLEWVGRISPDGGTTYYADSVKGRFTISRDNSKNTLYLQMNSLRAEDTAVYYCARDLYTNSYYYGLDDWGQGTLVTVSS

SEQ ID NO: 1516 - protein, 118 aa, Artificial Sequence
  Description of Artificial Sequence: Synthetic polypeptide
EVQLLESGGGLVQPGGSLRLSCKASGYTFTYYSMSWVRQAPGKGLEWIGRINPGSGGTKYNQKFKGKATISRDNSKNTLYLQMNSLRAEDTAVYYCARYYGYGYFDFWGQGTLVTVSS

SEQ ID NO: 1517 - protein, 123 aa, Artificial Sequence
  Description of Artificial Sequence: Synthetic polypeptide
EVQLLESGGGLVQPGGSLRLSCKASGYTFTSYAMHWVRQAPGKGLEWVGRINPNGGSTYYADSFKGRFTISRDNSKNTLYLQMNSLRAEDTAVYYCARVSYYYGSSGWSMDFWGPGTLVTVSS

SEQ ID NO: 1518 - protein, 115 aa, Artificial Sequence
  Description of Artificial Sequence: Synthetic polypeptide
EVQLLESGGGLVQPGGSLRLSCKASGYTFSSYSMHWVRQAPGKGLEWIGAIYYSGSTNYNPSLKSRVTISRDNSKNTLYLQMNSLRAEDTAVYYCARGDSGLAFWGQGTLVTVSS

SEQ ID NO: 1519 - protein, 117 aa, Artificial Sequence
  Description of Artificial Sequence: Synthetic polypeptide
EVQLLESGGGLVQPGGSLRLSCKASGYTFSSYYMSWVRQAPGKGLEWIGWIDPDSGGTKYNEKFKDKATISRDNSKNTLYLQMNSLRAEDTAVYYCARDGGGYFDYWGQGTLVTVSS

SEQ ID NO: 1520 - protein, 118 aa, Artificial Sequence
  Description of Artificial Sequence: Synthetic polypeptide
EVQLLESGGGLVQPGGSLRLSCKASGYTFSSYSMPWVRQAPGKGLEWIGLIYHSGSTNYNPSLKSRVTISRDNSKNTLYLQMNSLRAEDTAVYYCARGGRLYYYMDFWGQGTLVTVSS

SEQ ID NO: 1521 - protein, 118 aa, Artificial Sequence
  Description of Artificial Sequence: Synthetic polypeptide
EVQLLESGGGLVQPGGSLRLSCKASGYTFSSYSINWVRQAPGKGLEWIGSIYHSGSTNYNPSLKSRVTISRDNSKNTLYLQMNSLRAEDTAVYYCAVTTPVTGAWDDWGQGTLVTVSS

SEQ ID NO: 1522 - protein, 118 aa, Artificial Sequence
  Description of Artificial Sequence: Synthetic polypeptide
EVQLLESGGGLVQPGGSLRLSCKASGFTFSYYSMSWVRQAPGKGLEWIGRINPDSGGTKYNQKFKGKATISRDNSKNTLYLQMNSLRAEDTAVYYCARDYGYYYIDVWGQGTLVTVSS

SEQ ID NO: 1523 - protein, 123 aa, Artificial Sequence
  Description of Artificial Sequence: Synthetic polypeptide
EVQLLESGGGLVQPGGSLRLSCKASGFTFSSYGMHWVRQAPGKGLEWIGCINPSNGGTKYNQKFKGKATISRDNSKNTLYLQMNSLRAEDTAVYYCARDAYDYGSSYYAFDVWGQGTLVTVSS

SEQ ID NO: 1524 - protein, 119 aa, Artificial Sequence
  Description of Artificial Sequence: Synthetic polypeptide
EVQLLESGGGLVPPGGSLRLSCKASGFTFTSYSMSWVRQAPGKGLEWVGRINPDGGGTYYADSVKGRFTISRDNSKNTLYLQMNSLRAEDTAVYYCARYGGGPYAMDYWSQGTLVTVSS

SEQ ID NO: 1525 - protein, 118 aa, Artificial Sequence
  Description of Artificial Sequence: Synthetic polypeptide
EVQLLESGGGLVQPGGSLRLSCKASGYTFTAYAMYWVRQAPGKGLEWIGAIYHSGSTNYNPSLKSRVTISRDNSKNTLYLQMNSLRAEDTAVYYCARDSYYSNYMDYWGQGTLVTVSS

SEQ ID NO: 1526 - protein, 119 aa, Artificial Sequence
  Description of Artificial Sequence: Synthetic polypeptide
EVQLLESGGGLVQPGGSLRLSCKASGYTFSSYYMHWVRQAPGKGLEWIGVINHSGSTNYNPSLKSRVTISRDNSKNTLYLQMNSLRAEDTAVYYCARGGGYYSSYLDYWGQGTLVTVSS

SEQ ID NO: 1527 - protein, 116 aa, Artificial Sequence
  Description of Artificial Sequence: Synthetic polypeptide
EVQLLESGGGLVQPGGSLRLSCKASGFTFTSYYMHWVRQAPGKGLEWIGAITHSGSTNYNPSLKSRVTISRDNSKNTLYLQMNSLRAEDTAVYYCARYYGGSLDDWGQGTLVTVSS

SEQ ID NO: 1528 - protein, 122 aa, Artificial Sequence
  Description of Artificial Sequence: Synthetic polypeptide
EVQLLESGGGLVQPGGSLRLSCKASGFTFTSYAMHWVRQAPGKGLEWVGRINPGGGGTYYADSVKGRFTISRDNSKNTLYLQMNSLRAEDTAVYYCARDIYNYGSYYAMDVWGQGTLVTVSS

SEQ ID NO: 1529 - protein, 119 aa, Artificial Sequence
  Description of Artificial Sequence: Synthetic polypeptide
EVQLLESGGGLVQPGGSLRLSCKASGYTFTSYSMNWVRQAPGKGLEWIGWIDPGNGGTNYNQKFKGKATISRDNSKNTLYLQMNSLRAEDTAVYYCARGGGGGYALDVWGQGTLVTVSS

SEQ ID NO: 1530 - protein, 122 aa, Artificial Sequence
  Description of Artificial Sequence: Synthetic polypeptide
EVQLLESGGGLVQPGGSLRLSCKASGFTFSSYSMSWVRQAPGKGLEWIGEIYHSGSTYYNPSLKSRVTISRDNSKNTLYLQMNSLRAEDTAVYYCARVGYYDSSSGWSLDFWGQGTLVTVSS

SEQ ID NO: 1531 - protein, 113 aa, Artificial Sequence
  Description of Artificial Sequence: Synthetic polypeptide
EVQLLESGGGLVQPGGSLRLSCKASGYTFSSYGMHWVRQAPGKGLEWIGVISHSGSTYYNPSLKSRVTISRDNSKNTLYLQMNSLRAEDTAVYYCARYGFDYWGQGTLVTVSS

SEQ ID NO: 1532 - protein, 123 aa, Artificial Sequence
  Description of Artificial Sequence: Synthetic polypeptide
EVQLLESGGGLVQPGGSLRLSCKASGFTFTSYSMHWVRQAPGKGLEWVGRISPDGGNTYYADSVKGRFTISRDNSKNTLYLQMNSLRAEDTAVYYCARVGYYYGSSDWSLDYWGQGTLVTVSS

SEQ ID NO: 1533 - protein, 119 aa, Artificial Sequence
  Description of Artificial Sequence: Synthetic polypeptide
EVQLLESGGGLVQPGGSLRLSCKASGYTFSSYSMNWVRQAPGKGLEWIGRIDPDNGDTNYNEKFKGKATISRDNSKNTLYLQMNSLRAEDTAVYYCARGDRFSWDMDVWGQGTLVTVSS

SEQ ID NO: 1534 - protein, 122 aa, Artificial Sequence
  Description of Artificial Sequence: Synthetic polypeptide
EVQLLESGGGLVQPGGSLRLSCKASGFTFSSYSIHWVRQAPGKGLEWIGDINHSGSTYYNPSLKSRVTISRDNSKNTLYLQMNSLRAEDTAVYYCARVGYYGSSSGWYMDYWGQGTLVTVSS

SEQ ID NO: 1535 - protein, 117 aa, Artificial Sequence
  Description of Artificial Sequence: Synthetic polypeptide
EVQLLESGGGLVHPGGSLRLSCKASGFTFTSYSMNWVRQAPGKGLEWIGWINPDSGSTKYTQKFKGRATISRDNSKNTLYLQMNSLRAEDTAVYYCARDYDYDFDYWGHGTLVTVSS

SEQ ID NO: 1536 - protein, 116 aa, Artificial Sequence
  Description of Artificial Sequence: Synthetic polypeptide
EVQLLESGGGLVQPGGSLRLSCKASGFTFSSYSMHWVRQAPGKGLEWVGRISPSGGGTYYADSVKGRFTISRDNSKNTLYLQMNSLRAEDTAVYYCARGSGAIAYWGQGTLVTVSS

SEQ ID NO: 1537 - protein, 119 aa, Artificial Sequence
  Description of Artificial Sequence: Synthetic polypeptide
EVQLLESGGGLVQPGGSLRLSCKASGFTFTNYSMNWVRQAPGKGLEWIGRIDPGSGGTKYNQKFKGKATISRDNSKNTLYLQMNSLRAEDTAVYYCARGRYGYDALDFWGQGTLVTVSS

SEQ ID NO: 1538 - protein, 118 aa, Artificial Sequence
  Description of Artificial Sequence: Synthetic polypeptide
EVQLLESGGGLVQPGGSLRLSCKASGYTFSSYYMHWVRQAPGKGLEWIGAITYSGSTNYNPSLKSRVTISRDNSKNTLYLQMNSLRAEDTAVYYCARHSSGGYYIDYWGQGTLVTVSS

SEQ ID NO: 1539 - protein, 118 aa, Artificial Sequence
  Description of Artificial Sequence: Synthetic polypeptide
EVQLLESGGGLVQPGGSLRLSCKASGYTFTSYGMPWVRQAPGKGLEWIGVIYYSGSTNYNPSLKSRVTISRDNSKNTLYLQMNSLRAEDTAVYYCARGDRGSYDMDYWGQGTLVTVSS

SEQ ID NO: 1540 - protein, 116 aa, Artificial Sequence
  Description of Artificial Sequence: Synthetic polypeptide
EVQLLESGGGLVQPGGSLRLSCKASGFTFSSYAMHWVRQAPGKGLEWIGRINPSSGGTNYNEKFKGRFTISRDNSKNTLYLQMNSLRAEDTAVYYCARRGYYFDDWGQGTLVTVSS

SEQ ID NO: 1541 - protein, 118 aa, Artificial Sequence
  Description of Artificial Sequence: Synthetic polypeptide
EVQLLESGGGLVQPGGSLRLSCKASGFTFSSYAMHWVRQAPGKGLEWIGEIYHSGSTNYNPSLKSRVTISRDNSKNTLYLQMNSLRAEDTAVYYCARDGGGGYYLDFWGQGTLVTVSS

SEQ ID NO: 1542 - protein, 118 aa, Artificial Sequence
  Description of Artificial Sequence: Synthetic polypeptide
EVQLLESGGGLVQPGGSLRLSCKASGFTFSSYSMRWVRQAPGKGLEWIGFITHSGSTNYNPSLKSRVTISRDNSKNTLYLQMNSLRAEDTAVYYCARDRYYSYAIDFWGQGTLVTVSS

SEQ ID NO: 1543 - protein, 117 aa, Artificial Sequence
  Description of Artificial Sequence: Synthetic polypeptide
EVQLLESGGGLVQPGGSLRLSCKASGYTFTGYAMNWVRQAPGKGLEWIGWINPGSGGTNYDEKFKGRATISRDNSKNTLYLQMNSLRAEDTAVYYCARVRYYAFDYWGQGTLVTVSS

SEQ ID NO: 1544 - protein, 121 aa, Artificial Sequence
  Description of Artificial Sequence: Synthetic polypeptide
EVQLLESGGGLVQPGGSLRLSCKASGYTFTNYSINWVRQAPGKGLEWIGSIYHSGSTNYNPSLKSRVTISRDNSKNTLYLQMNSLRAEDTAVYYCARDLYNSGSYYGLDVWGQGTLVTVSS

SEQ ID NO: 1545 - protein, 117 aa, Artificial Sequence
  Description of Artificial Sequence: Synthetic polypeptide
EVQLLESGGGLVQPGGSLRLSCKASGYTFTSYWMPWVRQAPGKGLEWIGFISYSGSTYYNPSLKSRVTISRDNSKNTLYLQMNSLRAEDTAVYYCARYYGYYYMAYWGQGTLVTVSS

SEQ ID NO: 1546 - protein, 118 aa, Artificial Sequence
  Description of Artificial Sequence: Synthetic polypeptide
EVQLLESGGGLVQPGGSLRLSCKASGYTFTSYAMHWVRQAPGKGLEWIGVISYSGSTNYNPSLKSRVTISRDNSKNTLYLQMNSLRAEDTAVYYCARGHSFYWALDDWGQGTLVTVSS

SEQ ID NO: 1547 - protein, 118 aa, Artificial Sequence
  Description of Artificial Sequence: Synthetic polypeptide
EVQLLESGGGLVQPGGSLRLSCKASGYTFTSYSMHWVRQAPGKGLEWIGSISHSGSTYYNPSLKSRVTISRDNSKNTLYLQMNSLRAEDTAVYYCARHGSDGYAIDYWGQGTLVTVSS

SEQ ID NO: 1548 - protein, 116 aa, Artificial Sequence
  Description of Artificial Sequence: Synthetic polypeptide
EVQLLESGGGLVQPGGSLRLSCKASGYTFTNYAINWVRQAPGKGLEWVGRISPGGGSTYYAASVKGRFTISRDNSKNTLYLQMNSLRAEDTAVYYCARRGYAMDVWGQGTLVTVSS

SEQ ID NO: 1549 - protein, 115 aa, Artificial Sequence
  Description of Artificial Sequence: Synthetic polypeptide
EVQLLESGGGLVQPGGSLRLSCKASGFTFSSYWMSWVRQAPGKGLEWIGSINYSGSTYYNPSLKSRVTISRDNSKNTLYLQMNSLRAEDTAVYYCARHHYGMDYWGQGTLVTVSS

SEQ ID NO: 1550 - protein, 116 aa, Artificial Sequence
  Description of Artificial Sequence: Synthetic polypeptide
EVQLLESGGGLVQPGGSLRLSCKASGFTFTAYYMHWVRQAPGKGLEWIGWINPGSGGTNYDEKFKGRATISRDNSKNTLYLQMNSLRAEDTAVYYCARGSAGMAVWGQGTLVTVSS

SEQ ID NO: 1551 - protein, 118 aa, Artificial Sequence
  Description of Artificial Sequence: Synthetic polypeptide
EVQLLESGGGLVQPGGSLRLSCKASGYTFTSYAMNWVRQAPGKGLEWVGRISPGGGTTDYAASVKGRFTISRDNSKNTLYLQMNSLRAEDTAVYYCARGYGYYSLDYWGQGTLVTVSS

SEQ ID NO: 1552 - protein, 120 aa, Artificial Sequence
  Description of Artificial Sequence: Synthetic polypeptide
EVQLLESGGGLVQPGGSLRLSCKASGYTFTNYSMHWVRQAPGKGLEWVGRINPGGGSTYYADSVKGRFTISRDNSKNTLYLQMNSLRAEDTAVYYCARDGYGYGNHLDVWGQGTLVTVSS

SEQ ID NO: 1553 - protein, 118 aa, Artificial Sequence
  Description of Artificial Sequence: Synthetic polypeptide
EVQLLESGGGLVQPGGSLRLSCKASGYTFTSYWMHWVRQAPGKGLEWIGWINPNSGGTKYTEKFKGRATISRDNSKNTLYLQMNSLRAEDTAVYYCARGNGWGYFDYWGQGTLVTVSS

SEQ ID NO: 1554 - protein, 119 aa, Artificial Sequence
  Description of Artificial Sequence: Synthetic polypeptide
EVQLLESGGGLVQPGGSLRLSCKASGYTFTSYSMHWVRQAPGKGLEWIGWIDPSSGGTKYNEKFKGKATISRDNSKNTLYLQMNSLRAEDTAVYYCARGDSGSWYLDDWGQGTLVTVSS

SEQ ID NO: 1555 - protein, 116 aa, Artificial Sequence
  Description of Artificial Sequence: Synthetic polypeptide
EVQLLESGGGLVQPGGSLRLSCKASGYTFTSYWMPWVRQAPGKGLEWVGRINPGGGGTYYADSVKGRFTISRDNSKNTLYLQMNSLRAEDTAVYYCAHEGYDIDYWGQGTLVTVSS

SEQ ID NO: 1556 - protein, 121 aa, Artificial Sequence
  Description of Artificial Sequence: Synthetic polypeptide
EVQLLESGGGLVQPGGSLRLSCKASGFTFTDYAMHWVRQAPGKGLEWIGSITHSGSTYYNPSLKSRVTISRDNSKNTLYLQMNSLRAEDTAVYYCARDLYIYSYYYGLDYWGQGTLVTVSS

SEQ ID NO: 1557 - protein, 122 aa, Artificial Sequence
  Description of Artificial Sequence: Synthetic polypeptide
EVQLLESGGGLVQPGGSLRLSCKASGYTFSSYWMHWVRQAPGKGLEWVGRISPGGGGTYYADSFKGRFTISRDNSKNTLYLQMNSLRAEDTAVYYCARDLYSNGYYYGMDDWGQGTLVTVSS

SEQ ID NO: 1558 - protein, 123 aa, Artificial Sequence
  Description of Artificial Sequence: Synthetic polypeptide
EVQLLESGGGLVQPGGSLRLSCKASGFTFSSYAMSWVRQAPGKGLEWIGWINPDSGSTKYNEKFKGRATISRDNSKNTLYLQMNSLRAEDTAVYYCARVGADRLSEVQPFDDWGPGTLVTVSS

SEQ ID NO: 1559 - protein, 119 aa, Artificial Sequence
  Description of Artificial Sequence: Synthetic polypeptide
EVQLLESGGGLVQPGGSLRLSCKASGYTFTSYSMSWVRQAPGKGLEWIGEISYSGSTYYNPSLKSRVTISRDNSKNTLYLQMNSLHAEDTAVYYCARDYSYGYSDMDYWGQGTLVTVSS

SEQ ID NO: 1560 - protein, 120 aa, Artificial Sequence
  Description of Artificial Sequence: Synthetic polypeptide
EVQLLESGGGLVQPGGSLRLSCKASGFTFTSYYMNWVRQAPGKGLEWIGWINPDSGGTKYAEKFKGRATISRDNSKNTLYLQMNSLRAEDTAVYYCARYNYGYDSYLDYWGQGTLVTVSS

SEQ ID NO: 1561 - protein, 116 aa, Artificial Sequence
  Description of Artificial Sequence: Synthetic polypeptide
EVQLLESGGGLVQPGGSLRLSCKASGYTFTSYAMHWVRQAPGKGLEWIGDINYSGSTNYNPSLKSRVTISRDNSKNTLYLQMNSLRAEDTAVYYCARGRYGYIDYWGQGTLVTVSS

SEQ ID NO: 1562 - protein, 118 aa, Artificial Sequence
  Description of Artificial Sequence: Synthetic polypeptide
EVQLLESGGGLVQPGGSLRLSCKASGFTFSYYSIHWVRQAPGKGLEWIGAINHSGSTYYNPSLKSRVTISRDNSKNTLYLQMNSLRAEDTAVYYCARGGYGYYYMDVWGQGTLVTVSS

SEQ ID NO: 1563 - protein, 123 aa, Artificial Sequence
  Description of Artificial Sequence: Synthetic polypeptide
EVQLLESGGGLVQPGGSLRLSCKASGYTFSSYSMNWVRQAPGKGLEWVGRINQGGGSTYYADSFKGRFTISRDNSKNTLYLQMNSLRAEDTAVYYCARVGYYYGSSYWDMDYWGQGTLVTVSS

SEQ ID NO: 1564 - protein, 119 aa, Artificial Sequence
  Description of Artificial Sequence: Synthetic polypeptide
EVQLLESGGGLVQPGGSLRLSCKASGYTFSDYWMYWVRQAPGKGLEWIGRINPGSGSTNYAEKFKGRATISRDNSKNTLYLQMNSLRAEDTAVYYCARGYYGSYAIDYWGQGTLVTVSS

SEQ ID NO: 1565 - protein, 123 aa, Artificial Sequence
  Description of Artificial Sequence: Synthetic polypeptide
EVQLLESGGGLVQPGGSLRLSCKASGYTFTSYWMHWVRQAPGKGLEWIGRINPGSGGTNYNEKFKAKATISRDNSKNTLYLQMNSLRAEDTAVYYCARVGYYGGSSGYYLDYWGQGTLVTVSS

SEQ ID NO: 1566 - protein, 119 aa, Artificial Sequence
  Description of Artificial Sequence: Synthetic polypeptide
EVQLLESGGGLVQPGGSLRLSCKASGYTFTSYYMSWVRQAPGKGLEWIGWINPDSGGTKYDDKSKGRATISRDNSKNTLYLQMNSLRAEDTAVYYCARGRYGSYYMDDWGQGTLVTVSS

SEQ ID NO: 1567 - protein, 118 aa, Artificial Sequence
  Description of Artificial Sequence: Synthetic polypeptide
EVQLLESGGGLVQPGGSLRLSCKASGFTFTSYSMNWVRQAPGKGLEWIGRIDPGSGGTNYNQKFKGKATISRDNSKNTLYLQMNSLRAEDTAVYYCARGYYGYGIDVWGQGTLVTVSS

SEQ ID NO: 1568 - protein, 118 aa, Artificial Sequence
  Description of Artificial Sequence: Synthetic polypeptide
EVQLLESGGGLVQPGGSLRLSCKASGYTFTYYRMPWVRQAPGKGLEWVGRISPNGGSTYYADSFKGRATISRDNSKNTLYLQMNSLRAEDTAVYYCARDHSGYYIDYWGQGTLVTVSS

SEQ ID NO: 1569 - protein, 118 aa, Artificial Sequence
  Description of Artificial Sequence: Synthetic polypeptide
EVQLLESGGGLVQPGGSLRLSCKASGYTFTSYSMSWVRQAPGKGLEWIGYINHSGSTYYNPSLKSRVTISRDNSKNTLYLQMNSLRAEDTAVYYCARDRYGYDGMDFWGQGTLVTVSS

SEQ ID NO: 1570 - protein, 116 aa, Artificial Sequence
  Description of Artificial Sequence: Synthetic polypeptide
EVQLLESGGGLVQPGGSLRLSCKASGYTFTNYAINWVRQAPGKGLEWVGRISPSGGGTYYAASVKGRFTISRDNSKNTLYLQMNSLRAEDTAVYYCARSYWYIDYWGQGTLVTVSS

SEQ ID NO: 1571 - protein, 117 aa, Artificial Sequence
  Description of Artificial Sequence: Synthetic polypeptide
EVQLLESGGGLVQPGGSLRLSCKASGFTFSSYAMNWVRQAPGKGLEWVGRISPGGGDTYYADSFKGRFTISRDNSKNTLYLQMNSLRAEDTAVYYCARVGSGVMDYWGQGTLVTVSS

SEQ ID NO: 1572 - protein, 117 aa, Artificial Sequence
  Description of Artificial Sequence: Synthetic polypeptide
EVQLLESGGGLVQPGGSLRLSCKASGYTFTSYGMHWVRQAPGKGLEWIGAINYSGSTYYNPSLKSRVTISRDNSKNTLYLQMNSLRAEDTAVYYCARDDGGSYFDYWGQGTLVTVSS

SEQ ID NO: 1573 - protein, 118 aa, Artificial Sequence
  Description of Artificial Sequence: Synthetic polypeptide
EVQLLESGGGLVQPGGSLRLSCKASGYTFTSYSMHWVRQAPGKGLEWIGAIYHSGSTNYNPSLKSRVTISRDNSKNTLYLQMNSLRAEDTAVYYCARHGGDSYDLDYWGQGTLVTVSS

SEQ ID NO: 1574 - protein, 121 aa, Artificial Sequence
  Description of Artificial Sequence: Synthetic polypeptide
EVQLLESGGGLVQPGGSLRLSCKASGYTFSSYWMPWVRQAPGKGLEWIGVINHSGSTNYNPSLKSRVTISRDNSKNTLYLQMNSLRAEDTAVYYCARDGYYGYSYYDFDDWGQGTLVTVSS

SEQ ID NO: 1575 - protein, 119 aa, Artificial Sequence
  Description of Artificial Sequence: Synthetic polypeptide
EVQLLESGGGLVQPGGSLRLSCKASGYTFSSYSMHWVRQAPGKGLEWIGRINPGSGSTNYTQKFKGRATISRDNSKNTLYLQMNSLRAEDTAVYYCARGGYYGYAFDVWGQGTLVTVSS

SEQ ID NO: 1576 - protein, 109 aa, Artificial Sequence
  Description of Artificial Sequence: Synthetic polypeptide
DIQMTQSPSSLSASVGDRVTITCRASQYVSSYLNWYQQKPGKAPKLLIYAASSLQSGVPSRFSGSGSGTDFTLTISSLQPEDFATYYCQSYDYSLGGGVFGGGTKVEIK

SEQ ID NO: 1577 - protein, 109 aa, Artificial Sequence
  Description of Artificial Sequence: Synthetic polypeptide
DIQMTQSPSSLSASVGDRVTITCRASQDVSRYLDWYQQKPGKAPKLLIYAASSLQSGVPSRFSGSGSGTDFTLTISSLQPEDFATYYCQSYDYSLGVYVFGGGTKVEIK

SEQ ID NO: 1578 - protein, 109 aa, Artificial Sequence
  Description of Artificial Sequence: Synthetic polypeptide
DIQMTQSPSSLSASVGDRVTITCRASQYVSSYLDWYQQKPGKAPKLLIYAASSLQSGVPSRFSGSGSGTDFTLTISSLQPEDFATYYCQSYDSSLGDYVFGGGTKVEIK

SEQ ID NO: 1579 - protein, 109 aa, Artificial Sequence
  Description of Artificial Sequence: Synthetic polypeptide
DIQMTQSPSSLSASVGDRVTITCRASQDVSRYLNWYQQKPGKAPKLLIYAASSLQSGVPSRFSGSGSGTDFTLTISSLQPEDFATYYCQSWDNSLAGVVFGGGTKVEIK

SEQ ID NO: 1580 - protein, 109 aa, Artificial Sequence
  Description of Artificial Sequence: Synthetic polypeptide
DIQMTQSPSSLSASVGDRVTITCRASQDVSRYLDWYQQKPGKAPKLLIYAASSLQSGVPSRFSGSGSGTDFTLTISSLQPEDFATYYCEAYDYSSGGLVFGGGTKVEIK

SEQ ID NO: 1581 - protein, 109 aa, Artificial Sequence
  Description of Artificial Sequence: Synthetic polypeptide
DIQMTQSPSSLSASVGDRVTITCRASQYVSRYLAWYQQKPGKAPKLLIYAASSLQSGVPSRFSGSGSGTDFTLTISSLQPEDFATYYCQSWDNSGDNDVFGGGTKVEIK

SEQ ID NO: 1582 - protein, 109 aa, Artificial Sequence
  Description of Artificial Sequence: Synthetic polypeptide
DIQMTQSPSSLSASVGDRVTITCRASQDVSSYLTWYQQKPGKAPKLLIYAASSLQSGVPSRFSGSGSGTDFTLTISSLQPEDFATYYCQSYDNSSPPVVFGGGTKVEIK

SEQ ID NO: 1583 - protein, 109 aa, Artificial Sequence
  Description of Artificial Sequence: Synthetic polypeptide
DIQMTQSPSSLSASVGDRVTITCRASQYVSTYLAWYQQKPGKAPKLLIYAASSLQSGVPSRFSGSGSGTDFTLTISSLQPEDFATYYCASWDNSAPNYVFGGGTKVEIK

SEQ ID NO: 1584 - protein, 109 aa, Artificial Sequence
  Description of Artificial Sequence: Synthetic polypeptide
DIQMTQSPSSLSASVGDRVTITCRASQSISKYLDWYQQKPGKAPKLLIYAASSLQSGVPSRFSGSGSGTDFTLTISSLQPEDFATYYCQSWDASSGAYVFGGGTKVEIK

SEQ ID NO: 1585 - protein, 109 aa, Artificial Sequence
  Description of Artificial Sequence: Synthetic polypeptide
DIQMTQSPSSLSASVGDRVTITCRASQDVSRYLDWYQQKPGKAPKLLIYAASSLQSGVPSRFSGSGSGTDFTLTISSLQPEDFATYYCQSYDNSGNLFVFGGGTKVEIK

SEQ ID NO: 1586 - protein, 108 aa, Artificial Sequence
  Description of Artificial Sequence: Synthetic polypeptide
DIQMTQSPSSLSASVGDRVTITCRASQAVSRYLAWYQQKPGKAPKLLIYAASSLQSGVPSRFSGSGSGTDFTLTISSLQPEDFATYYCSSYASSPPYVFGGGTKVEIK

SEQ ID NO: 1587 - protein, 109 aa, Artificial Sequence
  Description of Artificial Sequence: Synthetic polypeptide
DIQMTQSPSSLSASVGDRVTITCRASQSISSYLDWYQQKPGKAPKLLIYAAPSLQSGVPSRFSGSGSGTDFTLTISSLQPEDFATYYCQSWDSSLSVYVFGGGTKVEIK

SEQ ID NO: 1588 - protein, 109 aa, Artificial Sequence
  Description of Artificial Sequence: Synthetic polypeptide
DIQMTQSPSSLSASVGDRVTITCRASQAISTYLNWYQQKPGKAPKLLIYAASSLQSGVPSRFSGSGSGTDFTLTISSLQPEDFATYYCQSWDNSRHVDVFGGGTKVEIK

SEQ ID NO: 1589 - protein, 106 aa, Artificial Sequence
  Description of Artificial Sequence: Synthetic polypeptide
TIQMTQSPSSLSASVGDRVTITCRASQDISKYLTWYQQKPGKAPKLLIYAASSLQSGVPSRFSGSGSGTDFTLTISSLQPEDFATYYCQQYSGYWTFGGGTKVEIK

SEQ ID NO: 1590 - protein, 109 aa, Artificial Sequence
  Description of Artificial Sequence: Synthetic polypeptide
DIQMTQSPSSLSASVGDRVTITCRASQAVSNYLDWYQQKPGKAPKLLIYAASSLQSGVPSRFSGSGSGTDFALTISSLQPEDFATYYCQSWDASLDRGVFGGGTKVEIK

SEQ ID NO: 1591 - protein, 108 aa, Artificial Sequence
  Description of Artificial Sequence: Synthetic polypeptide
DIQMTQSPSSLSASVGDRVTITCRASQDISNYLTWYQQKPGKAPKLLIYAASSLQSGVPSRFSGSGSGTDFTLTISSLQPEDFATYYCSSYDSSTSLVFGGGTKVEIK

SEQ ID NO: 1592 - protein, 108 aa, Artificial Sequence
  Description of Artificial Sequence: Synthetic polypeptide
DIQMTQSPSSLSASVGDRVTITCRTSQDVSRYLNWYQQKPGKAPKLLIYAASSLQSGVPSRFSGSGSGTDFTLTISSLQPEDFATYYCQLWDSSSPFMFGGGTKVEIK

SEQ ID NO: 1593 - protein, 109 aa, Artificial Sequence
  Description of Artificial Sequence: Synthetic polypeptide
DIQMTQSPSSLSASVGDRVTITCRASQDVSKYLDWYQQKPGKAPKLLIYAASSLQSGVPSRFSGSGSGTDFTLTISSLQPEDFATYYCQSWDNSSNDFVFGGGTKVEIK

SEQ ID NO: 1594 - protein, 109 aa, Artificial Sequence
  Description of Artificial Sequence: Synthetic polypeptide
DIQMTQSPSSLSASVGDRVTITCRASQAVSTYLDWYQQKPGKAPKLLIYAASSLQSGVPSRFSGSGSGTDFTLTISSLQPEDFATYYCQAYDYSLDAYVFGGGTKVEIK

SEQ ID NO: 1595 - protein, 109 aa, Artificial Sequence
  Description of Artificial Sequence: Synthetic polypeptide
DIQMTQSPSSLSASVGDRVTITCRASQSVSRYLAWYQQKPGKAPKLLIYAASSLQSGVPSRFSGSGSGTDFTLTISSLQPEDFATYYCQSWDNSGAHDVFGGGTKVEIK

SEQ ID NO: 1596 - protein, 109 aa, Artificial Sequence
  Description of Artificial Sequence: Synthetic polypeptide
DIQMTQSPSSLSASVGDRVTITCRASQDVSSYLDWYQQKPGKAPKLLIYAASSLQSGVPSRFSGSGSGTDFTLTISSLQPEDFATYYCQSYDNSPSRYVFGGGTKVEIK

SEQ ID NO: 1597 - protein, 108 aa, Artificial Sequence
  Description of Artificial Sequence: Synthetic polypeptide
IQMTQSPSSLSASVGDRVTITCRASQAVSNYLNWYQQKPGKAPKLLIYAASSLQSGVPSRFSGSGSGTDFTLTISSLQPEDFATYYCEAWDDSLGRVVFGGGTKVEIK

SEQ ID NO: 1598 - protein, 108 aa, Artificial Sequence
  Description of Artificial Sequence: Synthetic polypeptide
DIQMTQSPSSLSASVGDRVTITCRASQAISSYLAWYQQKPGKAPKLLIYAASSLQSGVPSRFSGSGSGTDFTLTISSLQPEDFATYYCQSYDSSPSLVFGGGTKVEIK

SEQ ID NO: 1599 - protein, 109 aa, Artificial Sequence
  Description of Artificial Sequence: Synthetic polypeptide
DIQMTQSPSSLSASVGDRVTITCRASQDISSYLNWYQQKPGKAPKLLIYAASSLQSGVPSRFSGSGSGTDFTLTISSLQPEDFATYYCQSCDSSVYNDVFGGGTKVEIK

SEQ ID NO: 1600 - protein, 109 aa, Artificial Sequence
  Description of Artificial Sequence: Synthetic polypeptide
DIQMTQSPSSLSASVGDRVTITCRASQAVSSYLNWYQQKPGKAPKLLIYAASSLQSGVPSRFSGSGSGTDFTLTISSLQPEDFATYYCEAYDYSSGGVVFGGGTKVEIK

SEQ ID NO: 1601 - protein, 109 aa, Artificial Sequence
  Description of Artificial Sequence: Synthetic polypeptide
DIQMTQSPSSLSASVGDRVTITCRASQAVSRYLNWYQQKPGKAPKLLIYAASSLQSGVPSRFSGSGSGTDFTLTISSLQPEDFATYYCEAWDASLDHGVFGGGTKVEIK

SEQ ID NO: 1602 - protein, 108 aa, Artificial Sequence
  Description of Artificial Sequence: Synthetic polypeptide
DIQMTQSPSSLSASVGDRVTITCRASQAVSRYLTWYQQKPGKAPKLLIYAASSLQSGVPSRFSGSGSGTDFTLTISSLQPEDFATYYCQLYDGSPPLAFGGGTKVEIK

SEQ ID NO: 1603 - protein, 109 aa, Artificial Sequence
  Description of Artificial Sequence: Synthetic polypeptide
DIQMTQSPSSLSASVGDRVTITCRASQAISRYLDWYQQKPGKAPKLLIYAASSLQSGVPSRFSGSGSGTDFTLTISSLQPEDFATYYCQAYDASLGPYVFGGGTKVEIK

SEQ ID NO: 1604 - protein, 109 aa, Artificial Sequence
  Description of Artificial Sequence: Synthetic polypeptide
DIQMTQSPSSLSASVGDRVTITCRASQDISRYLNWYQQKPGKAPKLLIYAASSLQSGVPSRFSGSGSGTDFTLTISSLQPEDFATYYCQSWDNSASHFVFGGGTKVEIK

SEQ ID NO: 1605 - protein, 108 aa, Artificial Sequence
  Description of Artificial Sequence: Synthetic polypeptide
DIQMTQSPSSLSASVGDRVTITCRASQAVSTYLDWYQQKPGKAPKLLIYAASSLQSGVPSRFSGSGSGTDFTLTISALQPEDFATYYCSSYNSSPSFVFGGGTKVEIK

SEQ ID NO: 1606 - protein, 109 aa, Artificial Sequence
  Description of Artificial Sequence: Synthetic polypeptide
DIQMTQSPSSLSASVGDRVTITCRASQDVSNYPHWYQQKPGKAPKLLIYAASSLQSGVPSRFSGSGSGTDFTLTISSLQPEDFATYYCQSYDSSGTGFVFGGGTKVEIK

SEQ ID NO: 1607 - protein, 109 aa, Artificial Sequence
  Description of Artificial Sequence: Synthetic polypeptide
DIQMTQSPSSLSASVGDRVTITCRASQDVSRYLTWYQQKPGKAPKLLIYAASSLQSGVPSRFSGSGSGTDFTLTISSLQPEDFATYYCQSWDSSGPDAVFGGGTKVEIK

SEQ ID NO: 1608 - protein, 108 aa, Artificial Sequence
  Description of Artificial Sequence: Synthetic polypeptide
DIQMTQSPSSLSASVGDRVTITCRASQDVSRYLDWYQQKPGKAPKLLIYAASSLQSGVPSRFSGSGSGTDFTLTISSLQPEDFAAYYCQPYASSNSLAFGGGTKVEIK

SEQ ID NO: 1609 - protein, 107 aa, Artificial Sequence
  Description of Artificial Sequence: Synthetic polypeptide
DIQMTQSPSSLSASVGDRVTITCRASQDVSKYLAWYQQKPGKAPKLLIYAASSLQSGVPSRFSGSGSGTDFTLTISSLQPEDFATYYCQQYGSLPRTFGGGTKVEIK

SEQ ID NO: 1610 - protein, 106 aa, Artificial Sequence
  Description of Artificial Sequence: Synthetic polypeptide
DIQMTQSPSSLSASVGDRVTITCRASQAVSKYLNWYQQKPGKAPKLLIYAASSLQSGVPSRFSGSGSGTDFTLTISSLQPEDFATYYCQQSDEFFTFGGGTKVEIK

SEQ ID NO: 1611 - protein, 108 aa, Artificial Sequence
  Description of Artificial Sequence: Synthetic polypeptide
DIQMTQSPSSLSASVGDRVTITCRASQYVSSYLDWYQQKPGKAPKLLIYAASSLQSGVPSRFSGSGSGTDFTLTISSLQPEDFATYYCSPYDSSHSWVFGGGTKVEIK

SEQ ID NO: 1612 - protein, 108 aa, Artificial Sequence
  Description of Artificial Sequence: Synthetic polypeptide
DIQMTQSPSSLSASVGDRVTITCRASQDVSRYLNWYQQKPGKAPKLLIYAASSLQSGVPSRFSGSGSGTDFTLTISSLQPEDFATYYCSPYDSSPSGVFGGGTKVEIK

SEQ ID NO: 1613 - protein, 108 aa, Artificial Sequence
  Description of Artificial Sequence: Synthetic polypeptide
DIQMTQSPSSLSASVGDRVTITCRASQDVSRYLDWYQQKPGKAPKLLIYAASSLQSGVPSRFSGSGSGTDFTLTISSLQPEDFATYYCQSYDGSHPLTFGGGTKVEIK

SEQ ID NO: 1614 - protein, 108 aa, Artificial Sequence
  Description of Artificial Sequence: Synthetic polypeptide
DIQMTQSPSSLSASVGDRVTITCRASQDVSSYLNWYQQKPGKAPKLLIYAASSLQSGVPSRFSGSGSGTDFTLTISSLQPEDFATYYCSPYDSSPSLAFGGGTKVEIK

SEQ ID NO: 1615 - protein, 109 aa, Artificial Sequence
  Description of Artificial Sequence: Synthetic polypeptide
DIQMTQSPSSLSASVGDRVTITCRASQDVSTYLNWYQQKPGKAPKLLIYAASSLQSGVPSRFSGSGSGTDFTLTISSLQPEDFATYYCQSWDNSLTNYVFGGGTKVEIK

SEQ ID NO: 1616 - protein, 109 aa, Artificial Sequence
  Description of Artificial Sequence: Synthetic polypeptide
DIQMTQSPSSLSASVGDRVTITCRASQAVSRYLNWYQQKPGKAPKLLIYAASSLQSGVPSRFSGSGSGTDFTLTISSLQPEDFATYYCESWDASLSDGVFGGGTKVEIK

SEQ ID NO: 1617 - protein, 109 aa, Artificial Sequence
  Description of Artificial Sequence: Synthetic polypeptide
DIQMTQSPSSLSASVGDRVTITCRASQDVSTYLDWYQQKPGKAPKLLIYAASSLQSGVPSRFSGSGSGTDFTLTISSLQPEDFATYYCESWDSSSGPLVFGGGTKVEIK

SEQ ID NO: 1618 - protein, 108 aa, Artificial Sequence
  Description of Artificial Sequence: Synthetic polypeptide
DIQMTQSPSSLSASVGDRVTITCRASQDVSTYLTWYQQKPGKAPKLLIYAASSLQSGVPSRFSGSGSGTDFTLTISSLQPEDFATYYCSQYDSSPSLAFGGGTKVEIK

SEQ ID NO: 1619 - protein, 109 aa, Artificial Sequence
  Description of Artificial Sequence: Synthetic polypeptide
DIQMTQSPSSLSASVGDRVTITCRASQAISTYLAWYQQKPGKAPKLLIYAASSLQSGVPSRFSGSGSGTDFTLTISSLQPEDFATYYCQSYDNSAYNSVFGGGTKVEIK

SEQ ID NO: 1620 - protein, 108 aa, Artificial Sequence
  Description of Artificial Sequence: Synthetic polypeptide
DIQMTQSPSSLSASVGGRVTITCRASQALSTYLDWYQQKPGKAPKLLIYAASSLQSGVPSRFSGSGSGTDFTLTISSLQPEDFATYYCQAWDSSSTVVFGGGTKVEIK

SEQ ID NO: 1621 - protein, 108 aa, Artificial Sequence
  Description of Artificial Sequence: Synthetic polypeptide
DIQMTQSPSSLSASVGDRVTITCRASQTVSRYLNWYQQKPGKAPKLLIYAASSLQSGVPSRFSGSGSGTDLTLTISSLQPEDFATYYCQQYNSSHSLAFGGGTKVEIK

SEQ ID NO: 1622 - protein, 108 aa, Artificial Sequence
  Description of Artificial Sequence: Synthetic polypeptide
DIQMTQSPSSLSASVGDRVTITCRASQAVSSYLNWYQQKPGKAPKLLIYAASSLQSGVPSRFSGSGSGTDFTLTISSLQPEDFATYYCPSYASSPPLVFGGGTKVEIK

SEQ ID NO: 1623 - protein, 109 aa, Artificial Sequence
  Description of Artificial Sequence: Synthetic polypeptide
DIQMTQSPSSLSASVGDRVTITCRASQDISKYLHWYQQKPGKAPKLLIYAASSLQSGVPSRFSGSGSGTDFTLTISSLQPEDFATYYCEAYDDSLGGEVFGGGTKVEIK

SEQ ID NO: 1624 - protein, 107 aa, Artificial Sequence
  Description of Artificial Sequence: Synthetic polypeptide
DIQMTQSPSSLSASVGDRVTITCRASQDVSKYLAWYQQKPGKAPKLLIYAASSLQSGVPSRFSGSGSGTDFTLTISSLQPEDFATYYCQQYNSSPGTFGGGTKVEIK

SEQ ID NO: 1625 - protein, 109 aa, Artificial Sequence
  Description of Artificial Sequence: Synthetic polypeptide
DIQMTQSPSSLSASVGDRVTITCRASQDVSSYLNWYQQKPGKAPKLLIYAASSLQSGVPSRFSGSGSGTDFTLTISSLQPEDFATYYCESWDNSLSIYVFGGGTKVEIK

SEQ ID NO: 1626 - protein, 108 aa, Artificial Sequence
  Description of Artificial Sequence: Synthetic polypeptide
DIQMTQSPSSLSASVGDRVTITCRASQSISKYLTWYQQKPGKAPKLLIYAASSLQSGVPSRFSGSGSGTDFTLTISSLQPEDFATYYCQVWDGSYPLAFGGGTKVEIK

SEQ ID NO: 1627 - protein, 108 aa, Artificial Sequence
  Description of Artificial Sequence: Synthetic polypeptide
DIQMTQSPSSLSASVGDRVTITCRASQAVSRYLAWYQQKPGKAPKLLIYAASSLQSGVPSRFSGSGSGTDFTLTISSLQPEDFATYYCSSYASSPSLAFGGGTKVEIK

SEQ ID NO: 1628 - protein, 109 aa, Artificial Sequence
  Description of Artificial Sequence: Synthetic polypeptide
DIQMTQSPSSLSASVGDRVTITCRASQYVSSYLDWYQQKPGKAPKLLIYAASSLQSGVPSRFSGSGSGTDFTLTISSLQPEDFATYYCASWDDSLGHYVFGGGTKVEIK

SEQ ID NO: 1629 - protein, 109 aa, Artificial Sequence
  Description of Artificial Sequence: Synthetic polypeptide
DIQMTQSPSSLSASVGDRVTITCRASQAVSTYLAWYQQKPGKAPKLLIYAASSLQSGVPSRFSGSGSGTDFTLTISSLQPEDFATYYCQSYDNSGPPFVFGGGTKVEIK

SEQ ID NO: 1630 - protein, 108 aa, Artificial Sequence
  Description of Artificial Sequence: Synthetic polypeptide
DIQMTQSPSSLSASVGDRVTITCRASQYISTYLNWYQQKPGKAPKLLIYAASSLQSGVPSRFSGSGSGTDFTLTISSLQPEDFATYYCQLWDGSSPLVFGGGTKVEIK

SEQ ID NO: 1631 - protein, 108 aa, Artificial Sequence
  Description of Artificial Sequence: Synthetic polypeptide
DIQMTQSPSSLSASVGDRVTITCRASQSVSRYLNWYQQKPGKAPKLLIYAASSLQSGVPSRFSGSGSGTDFTLTISSLQPEDFATYYCSPYASSHSVAFGGGTKVEIK

SEQ ID NO: 1632 - protein, 108 aa, Artificial Sequence
  Description of Artificial Sequence: Synthetic polypeptide
DIQMTQSPSSLSASVGDRVTITCRASQDVSRYLNWYQQKPGKAPKLLIYAASSLQSGVPSRFSGSGSGTDFTLTISSLQPEDFATYYCQLWDGSYTFAFGGGTKVEIK

SEQ ID NO: 1633 - protein, 108 aa, Artificial Sequence
  Description of Artificial Sequence: Synthetic polypeptide
DIQMTQSPSSLSASVGDRVTITCRASQAISTYLDWYQQKPGKAPKLLIYAASSLQSGVPSRFSGSGSGTDFTLTISSLQPEDFATYYCQPYASSPSWVFGGGTKVEIK

SEQ ID NO: 1634 - protein, 108 aa, Artificial Sequence
  Description of Artificial Sequence: Synthetic polypeptide
DIQMTQSPSSLSASVGDRVTITCRASQYVSSYLAWYQQKPGKAPKLLVYAASSLQSGVPSRFSGSGSGTDFTLTISSLQPEDFATYYCSSYASSPPYMFGGGTKVEIK

SEQ ID NO: 1635 - protein, 108 aa, Artificial Sequence
  Description of Artificial Sequence: Synthetic polypeptide
DIQMTQSPSSLSASVGDRVTITCRASQDVSSYLPWYQQKPGKAPKLLIYAASSLQSGVPSRFSGSGSGTDFTLTISSLQPEDFATYYCQPYASSNPWMFGGGTKVEIK

SEQ ID NO: 1636 - protein, 106 aa, Artificial Sequence
  Description of Artificial Sequence: Synthetic polypeptide
DIQMTQSPSSLSVSVGDRVTITCRASQSVSSYLDWYQQKPGKAPKLLIYAASSLQSGVPSRFSGSGSGTDFTLTISSLQPEDFATYYCQQWPEPPTFGGGTKVEIK

SEQ ID NO: 1637 - protein, 109 aa, Artificial Sequence
  Description of Artificial Sequence: Synthetic polypeptide
DIQMTQSPSSLSASVGDRVTITCRASQDVSSYLNWYQQEPGKAPKLLIYAASSLQSGVPSRFSGSGSGTDFTLTIPSLQPEDFATYYCQAYDDSLGGVVFGGGTKVEIK

SEQ ID NO: 1638 - protein, 109 aa, Artificial Sequence
  Description of Artificial Sequence: Synthetic polypeptide
DIQMTQSPSSLSASVGDRVTITCRASQAVSNYLAWYQQKPGKAPKLLIYAASSLQSGVPSRFSGSGSGTDFTLTISSLQPEDFATYYCQSWDNSGDDVVFGGGTKVEIK

SEQ ID NO: 1639 - protein, 108 aa, Artificial Sequence
  Description of Artificial Sequence: Synthetic polypeptide
DIQMTQSPSSLSASVGDRVTITCRASHDVSRYLAWYQQKPGKAPKLLIYAASSLQSGVPSRFSGSGSGTDFTLTISSLQPEDFATYYCQAWDGSSPLMFGGGTKVEIK

SEQ ID NO: 1640 - protein, 107 aa, Artificial Sequence
  Description of Artificial Sequence: Synthetic polypeptide
NIQMTQSPSSLSASVGDRVIITCRASQSISTYLDWYQQKPGKAPKLLIYAASSLQSGVPSRFSGSGSGTDFTLTISSLQPEDFATYYCQQYDSRPSTFGGGTKVEIK

SEQ ID NO: 1641 - protein, 106 aa, Artificial Sequence
  Description of Artificial Sequence: Synthetic polypeptide
DIQMTQSPSSLSASVGDRVTITCRASQSVSTYLDWYQQKPGKAPKLLIYAASSLQSGVPSRFSGSGSGTDFTLTISSLQPEDFATYYCQQSRGSPTFGGGTKVEIK

SEQ ID NO: 1642 - protein, 109 aa, Artificial Sequence
  Description of Artificial Sequence: Synthetic polypeptide
DIQMTQSPSSLSASVGDRVTITCRASQSISSYLDWYQQKPGKAPKLLIYAASSLQSGVPSRFSGSGSGTDFTLTISSLQPEDFATYYCASYDYSSSHWVFGGGTKVEIK

SEQ ID NO: 1643 - protein, 109 aa, Artificial Sequence
  Description of Artificial Sequence: Synthetic polypeptide
DIQMTQSPSSLSASVGDRVTITCRASQAVSKYLNWYQQKPGKAPKLLIYAASSLQSGVPSRFSGSGSGTDFTLTISSLQPEDFATYYCGAWDDSLNHGVFGGGTKVEIK

SEQ ID NO: 1644 - protein, 109 aa, Artificial Sequence
  Description of Artificial Sequence: Synthetic polypeptide
DIQMTQSPSSLSASVGDRVTITCRASQDISSYLNWYQQKPGKAPKLLIYAASSLQSGVPSRFSGSGSGTDFTLTISSLQPEDFATYYCQSYDNSGNRFVFGGGTKVEIK

SEQ ID NO: 1645 - protein, 109 aa, Artificial Sequence
  Description of Artificial Sequence: Synthetic polypeptide
DIQMTQSPSSLSASVGDRVTITCRASQDVSKYLTWYQQKPGKAPKLLIYAASSLQSGVPSRFSGSGSGTDFTLTISSLQPEDFATYYCEAWDDSLSAYVFGGGTKVEIK

SEQ ID NO: 1646 - protein, 108 aa, Artificial Sequence
  Description of Artificial Sequence: Synthetic polypeptide
DIQMTQSPSSLSASVGDRVTITCRASQDVSNYLDWYQQKPGKAPKLLIYAASSLQSGVPSRFSGSGSGTDFTLTISSLQPEDFATYYCSPYDSSPPLMFGGGTKVEIK

SEQ ID NO: 1647 - protein, 108 aa, Artificial Sequence
  Description of Artificial Sequence: Synthetic polypeptide
DIQMTQSPSSLSASVGDRVTITCRASQDISRYLAWYQQKPGKAPKLLIYAASSLQSGVPSRFSGSGSGTDFTLTISSLQPEDFATYYCQAYDGSYTYVFGGGTKVEIK

SEQ ID NO: 1648 - protein, 109 aa, Artificial Sequence
  Description of Artificial Sequence: Synthetic polypeptide
DIQMTQSPSSLSASVGDRVTITCHASQDVSRYLAWYQQKPGKAPKLLIYAASSLQSGVPSRFSGSGSGTDFTLTISSLQPEDFATYYCQAWDYSLSPGVFGGGTKVEIK

SEQ ID NO: 1649 - protein, 109 aa, Artificial Sequence
  Description of Artificial Sequence: Synthetic polypeptide
DIQMTQSPSSLSASVGDRVTITCRASQDVSRYLDWYQQKPGKAPKLLIYAASSLQSGVPSRFSGSGSGTDFTLTISSLQPEDFATYYCQPWDGSSSPVVFGGGTKVEIK

SEQ ID NO: 1650 - protein, 109 aa, Artificial Sequence
  Description of Artificial Sequence: Synthetic polypeptide
DIQMTQSPSSLSASVGDRVTITCRASQSVSRYLAWYQQKPGKAPKLLIYAASSLQSGVPSRFSGSGSGTDFTLTISSLQPEDFATYYCQSWDSSSTHDVFGGGTKVEIK

SEQ ID NO: 1651 - protein, 109 aa, Artificial Sequence
  Description of Artificial Sequence: Synthetic polypeptide
DIQMTQSPSSLSASVGDRVTITCRASQAVSKYLHWYQQKPGKAPKLLIYAASSLQSGVPSRFSGSGSGTDFTLTISSLQPEDFATYYCQSYDNSADRYVFGGGTKVEIK

SEQ ID NO: 1652 - protein, 108 aa, Artificial Sequence
  Description of Artificial Sequence: Synthetic polypeptide
DIQMTQSPSSLSASVGDRVTITCRASQDVSRYLAWYQQKPGKAPKLLIYAASSLQSGVPSRFSGSGSGTDFTLTISSLQPEDFATYYCPSYDSSPPVMFGGGTKVEIK

SEQ ID NO: 1653 - protein, 108 aa, Artificial Sequence
  Description of Artificial Sequence: Synthetic polypeptide
DIQMTQSPSSLSASVGDRVTITCRASQAVSTYLTWYQQKPGKAPKLLIYAASSLQSGVPSRFSGSGSGTDFTLTISSLQPEDFATYYCSLYDSSPPLVFGGGTKVEIK

SEQ ID NO: 1654 - protein, 108 aa, Artificial Sequence
  Description of Artificial Sequence: Synthetic polypeptide
DIQMTQSPSSLSASVGDRVTITCRASQDVSNYLPWYQQKPGKAPKLLIYAASSLQSGVPSRFSGSGSGTDFTLTISSLQPEDFATYYCSSYASSPPLMFGGGTKVEIK

SEQ ID NO: 1655 - protein, 108 aa, Artificial Sequence
  Description of Artificial Sequence: Synthetic polypeptide
DIQMTQSPSSLSASVGDRVTITCRASQYISTYLHWYQQKPGKAPKLLIYAASSLQSGVPSRFSGSGSGTDFTLTISSLQPEDFATYYCSSYDSSPSGVFGGGTKVEIK

SEQ ID NO: 1656 - protein, 109 aa, Artificial Sequence
  Description of Artificial Sequence: Synthetic polypeptide
DIQMTQSPSSLSASVGDRVTITCRASQAVSKYLTWYQQKPGKAPKLLIYAASSLQSGVPSRFSGSGSGTDFTLTISSLQPEDFATYYCQAYDSSSSGGVFGGGTKVEIK

SEQ ID NO: 1657 - protein, 109 aa, Artificial Sequence
  Description of Artificial Sequence: Synthetic polypeptide
DIQMTQPPSSLSASVGDRVTITCRASQDVSTYLDWYQQKPGKAPKLLIYAASSLQSGVPSRFSGSGSGTDFTLTISSLQPEDFATYYCQSWDSSAPYVVFGGGTKVEIK

SEQ ID NO: 1658 - protein, 109 aa, Artificial Sequence
  Description of Artificial Sequence: Synthetic polypeptide
DIQMTQSPSSLSASVGDRVTITCRASQDVSSYLNWYQQKPGKAPKLLIYAASSLQSGVPSRFSGSGSGTDFTLTISSLQPEDFATYYCQSYDNSAHDTVFGGGTKVEIK

SEQ ID NO: 1659 - protein, 109 aa, Artificial Sequence
  Description of Artificial Sequence: Synthetic polypeptide
DIQMTQSPSSLSASVGDRVTITCRASQAVSKYLAWYQQKPGKAPKLLIYAASSLQSGVPSRFSGSGSGTDFTLTISSLQPEDFATYYCQAYDDSSGDGMFGGGTKVEIK

SEQ ID NO: 1660 - protein, 109 aa, Artificial Sequence
  Description of Artificial Sequence: Synthetic polypeptide
DIQMTQSPSSLSASVGDRVTITCRTSQSVSRYLNWYQQKPGKAPKLLIYAASSLQSGVPSRFSGSGSGTDFTLTISSLQPEDFATYYCESWDDSSNDGVFGGGTKVEIK

SEQ ID NO: 1661 - protein, 108 aa, Artificial Sequence
  Description of Artificial Sequence: Synthetic polypeptide
DIQMTQSPSSLSASVGDRVTITCRASQAVSNYLAWYQQKPGKAPKLLIYAASSLQSGVPSRFSGSGSGTDFTLTISSLQPEDFATYYCSQYTSSNSFMFGGGTKVEIK

SEQ ID NO: 1662 - protein, 109 aa, Artificial Sequence
  Description of Artificial Sequence: Synthetic polypeptide
DIQMTQSPSSLSASVGDRVTITCRASQDVSRYLAWYQQKPGKAPKLLIYAASSLQSGVPSRFSGSGSGTDFTLTISSLQPEDFATYYCQSWDSSSPLYVFGGGTKVEIK

SEQ ID NO: 1663 - protein, 108 aa, Artificial Sequence
  Description of Artificial Sequence: Synthetic polypeptide
DIQMTQSPSSLSASVGDRVTITCRASQAISRYLDWYQQKPGKAPKLLIYAASSLQSGVPSRFSGSGSGTDFTLTISSLQPEDFATYYCQSWDGSYPLMFGGGTKVEIK

SEQ ID NO: 1664 - protein, 106 aa, Artificial Sequence
  Description of Artificial Sequence: Synthetic polypeptide
DIQMTQSPSSLSASVGDRVTITCRASQAVSRYLDWYQQKPGKAPKLLIYAASSLQSGVPSRFSGSGSGTDFTLTISSLQPEDFATYYCQQWDSPSTFGGGTKVEIK

SEQ ID NO: 1665 - protein, 109 aa, Artificial Sequence
  Description of Artificial Sequence: Synthetic polypeptide
DIQMTQSPSSLSASVGDRVTITCRASQDVSSYLDWYQQKPGKAPKLLIYAASSLQSGVPSRFSGSGSGTDFTLTISSLQPEDFATYYCQSWDSSGNHVVFGGGTKVEIK

SEQ ID NO: 1666 - protein, 108 aa, Artificial Sequence
  Description of Artificial Sequence: Synthetic polypeptide
DIQITQSPSSLSASVGDRVTITCRASQAISRYLNWYQQKPGKAPKLLIYAASSLQSGVPSRFSGSGSGTDFTLTISSLQPEDFATYYCSPYDSSPPLVFGGGTKVEIK

SEQ ID NO: 1667 - protein, 109 aa, Artificial Sequence
  Description of Artificial Sequence: Synthetic polypeptide
DIQMTQSPSSLSASVGDRVTITCRASQAVSTYLDWYQQKPGKAPKLLIYAASSLQSGVPSRFSGSGSGTDFTLTISSLQPEDFATYYCQSYDSSRTDDVFGGGTKVEIK

SEQ ID NO: 1668 - protein, 109 aa, Artificial Sequence
  Description of Artificial Sequence: Synthetic polypeptide
DIQMTQSPSSLSASVGDRVTITCRASQAVSSYLNWYQQKPGKAPKLLIYAASSLQSGVPSRFSGSGSGTDFTLTISSLQPEDFATYYCQSYDASSSGYVFGGGTKVEIK

SEQ ID NO: 1669 - protein, 108 aa, Artificial Sequence
  Description of Artificial Sequence: Synthetic polypeptide
DIQMTQSPSSLSASVGDRVTITCRASQAVSTYLPWYQQKPGKAPKLLIYAASSLQSGVPSRFSGSGSGTDFTLTISSLQPEDFATYYCQAYDGSSTYAFGGGTKVEIK

SEQ ID NO: 1670 - protein, 108 aa, Artificial Sequence
  Description of Artificial Sequence: Synthetic polypeptide
DIQMTQSPSSLSASVGDRVTITCRASQAISTYLNWYQQKPGKAPKLLIYAASSLQSGVPSRFSGSGSGTDFTLTISSLQPEDFATYYCRVWDSSSPVVFGGGTKVEIK

SEQ ID NO: 1671 - protein, 118 aa, Artificial Sequence
  Description of Artificial Sequence: Synthetic polypeptide
EVQLLESGGGLVQPGGSLRLSCKASGFTFSYYSMSWVRQAPGKGLEWIGWINPNSGSTNYNQKFKGRATISRDNSKNTLYLQMNSLRAEDTAVYYCARYGYYGYMDVWGQGTLVTVSS

SEQ ID NO: 1672 - protein, 116 aa, Artificial Sequence
  Description of Artificial Sequence: Synthetic polypeptide
EVQLLESGGGLVQPGGSLRLSCKASGFTFSYYSMHWVRQAPGKGLEWVGRISPGGGNTYYADSVKGRFTISRDNSKNTLYLQMNSLRAEDTAVYYCARYRWGFDYWGQGTLVTVSS

SEQ ID NO: 1673 - protein, 115 aa, Artificial Sequence
  Description of Artificial Sequence: Synthetic polypeptide
EVQLLESGGGLVQPGGSLRLSCKASGYTFSSYWMRWVRQAPGKGLEWIGDITYSGSTNYNPSLKSRVTISRDNSKNTLYLQMNSLRAEDTAVYYCARYYYGFDVWGQGTLVTVSS

SEQ ID NO: 1674 - protein, 116 aa, Artificial Sequence
  Description of Artificial Sequence: Synthetic polypeptide
EVQLLESGGGLVQPGGSLRLSCKASGFTFSSYSMHWVRQAPGKGLEWVGRISPGGGGTYYADSVKGRATISRDNSKNTLYLQMNSLRAEDTAVYYCARYRWGFAYWGQGTLVTVSS

SEQ ID NO: 1675 - protein, 122 aa, Artificial Sequence
  Description of Artificial Sequence: Synthetic polypeptide
EVQLLESGGGLVQPGGSLRLSCKASGFTLSSYWMRWVRQAPGKGLEWVGRINPDGGGTYYADSVKGRFTISRDNSKNTLYLQMNSLRAEDTAVYYCARSGFYSVYDYGMDFWGQGTLVTVSS

SEQ ID NO: 1676 - protein, 123 aa, Artificial Sequence
  Description of Artificial Sequence: Synthetic polypeptide
EVQLLESGGGLVQPGGSLRLSCKASGYTFTSYAMRWVRQAPGKGLEWIGWIDPGNGGTKYNQKFKGKATISRDNSKNTLYLQMNSLRAEDTAVYYCAREYYGYYYYGSAIDYWGQGTLVTVSS

SEQ ID NO: 1677 - protein, 115 aa, Artificial Sequence
  Description of Artificial Sequence: Synthetic polypeptide
EVQLLESGGGLVQPGGSLRLSCKASGYTFSSYYMSWVRQAPGKGLEWIGSITYSGSTYYNPSLKSRVTISRDNSKNTLYLQMNSLRAEDTAVYYCARYYYYLDYWGQGTLVTVSS

SEQ ID NO: 1678 - protein, 116 aa, Artificial Sequence
  Description of Artificial Sequence: Synthetic polypeptide
EVQLLESGGGLVQPGGSLRLSCKASGFTFTYYSMHWVRQAPGKGLEWVGRISPGGGGTYYAASVKGRFTISRDNSKNTLYLQMNSLRAEDTAVYYCARSRWGLAYWGQGTLVTVSS

SEQ ID NO: 1679 - protein, 116 aa, Artificial Sequence
  Description of Artificial Sequence: Synthetic polypeptide
EVQLLESGGGLVQPGGSLRLSCKASGYTFSSYSMHWVRQAPGKGLEWVGRISPDGGGTYYADSVKGRFTISRDNSKNTLYLQMNSLRAEDTAVYYCARGGYALDDWGQGTLVTVSS

SEQ ID NO: 1680 - protein, 118 aa, Artificial Sequence
  Description of Artificial Sequence: Synthetic polypeptide
EVQLLESGGGLVQPGGSLRLSCKASGYTFSYYWMSWVRQAPGKGLEWVGRISPGGGSTYYADSVKGRTTISRDNSKNTLYLQMNSLRAEDTAVYYCARDSGWGAFDYWGQGTLVTVSS

SEQ ID NO: 1681 - protein, 118 aa, Artificial Sequence
  Description of Artificial Sequence: Synthetic polypeptide
EVQLLESGGGLVQPGGSLRLSCKASGFTFTSYSMPWVRQAPGKGLEWVGRINPGGGDTYYADSVKGRATISRDNSKNTLYLQMNSLRAEDTAVYYCAREGYYYALDYWGQGTLVTVSS

SEQ ID NO: 1682 - protein, 117 aa, Artificial Sequence
  Description of Artificial Sequence: Synthetic polypeptide
EVQLLESGGGLVQPGGSLRLSCKASGYTFSSYWMSWVRQAPGKGLEWIGSINYSGSTYYNPSLKSRVTISRDNSKNTLYLQMNSLRAEDTAVYYCARDDGWSDFDYWGQGTLVTVSS

SEQ ID NO: 1683 - protein, 119 aa, Artificial Sequence
  Description of Artificial Sequence: Synthetic polypeptide
EVQLLESGGGLVQPGGSLRLSCKASGYTFTSYWMSWVRQAPGKGLEWIGWINPSSGGTKYAEKFKGRATISRDNSKNTLYLQMNSLRAEDTAVYYCARYGYYYGYLDYWGQGTLVTVSS

SEQ ID NO: 1684 - protein, 118 aa, Artificial Sequence
  Description of Artificial Sequence: Synthetic polypeptide
EVQLLESGGGLVQPGGSLRLSCKASGYTFSSYSMRWVRQAPGKGLEWIGSISYSGSTYYNPSLKSRVTISRDNSKNTLYLQMNSLRAEDTAVYYCARGRSLYWDLDFWGQGTLVTVSS

SEQ ID NO: 1685 - protein, 116 aa, Artificial Sequence
  Description of Artificial Sequence: Synthetic polypeptide
EVQLLESGGGLVQPGGSLRLSCKASGYTFTSYSMHWVRQAPGKGLEWVGRISPDGGTTYYADSVKGRFTISRDNSKNTLYLQMNSLRAEDTAVYYCARYRWYFDYWGQGTLVTVSS

SEQ ID NO: 1686 - protein, 119 aa, Artificial Sequence
  Description of Artificial Sequence: Synthetic polypeptide
EVQLLESGGGLVQPGGSLRLSCKASGFTFTSYGMHWVRQAPGKGLEWIGWIDPGSGGTKYNEKFKGKATISRDNSKNTLYLQMNSLRAEDTAVYYCARGYGYGYGMDVWGQGTLVTVSS

SEQ ID NO: 1687 - protein, 118 aa, Artificial Sequence
  Description of Artificial Sequence: Synthetic polypeptide
EVQLLESGGGLVQPGGSLRLSCKASGFTFSSYYMSWVRQAPGKGLEWIGFIYHSGSTYYNPSLKSRVTISRDNSKNTLYLQMNSLRAEDTAVYYCARYAYYYGGMDYWGQGTLVTVSS

SEQ ID NO: 1688 - protein, 118 aa, Artificial Sequence
  Description of Artificial Sequence: Synthetic polypeptide
EVQLLESGGGLVQPGGSLRLSCKASGYTFTAYSMPWVRQAPGKGLEWIGDIYYSGSTYYNPSLKSRVTISRDNSKNTLYLQMNSLRAEDTAVYYCARGYYGGYGIDDWGQGTLVTVSS

SEQ ID NO: 1689 - protein, 118 aa, Artificial Sequence
  Description of Artificial Sequence: Synthetic polypeptide
EVQLLESGGGLVQPGGSLRLSCKASGFTFTSYSMRWVRQAPGKGLEWIGRIDPGSGGTNYNQKFKGKATISRDNSKNTLYLQMNSLRAEDTAVYYCARAHGSYDMDYWGQGTLVTVSS

SEQ ID NO: 1690 - protein, 122 aa, Artificial Sequence
  Description of Artificial Sequence: Synthetic polypeptide
EVQLLESGGGLVQPGGSLRLSCKASGFTFSSYWMNWVRQAPGKGLEWIGRINPGSGGTKYNEKFKGKATISRDNSKNTLYLQMNSLRAEDTAVYYCARGEGYDGYYYAMDYWGQGTLVTVSS

SEQ ID NO: 1691 - protein, 120 aa, Artificial Sequence
  Description of Artificial Sequence: Synthetic polypeptide
EVQLLESGGGLVQPGGSLRLSCKASGFTFTNYSMHWVRQAPGKGLEWIGEISYSGSTYYNPSLKSRVTISRDNSKNTLYLQMNSLRAEDTAVYYCARGGIYYYYYGLDDWGQGTLVTVSS

SEQ ID NO: 1692 - protein, 118 aa, Artificial Sequence
  Description of Artificial Sequence: Synthetic polypeptide
EVQLLESGGGLVQPGGSLRLSCKASGFTFTSYSMNWVRQAPGKGLEWIGDINYSGSTYYNPSLKSRVTISRDNSKNTLYLQMNSLRAEDTAVYYCARYRYGSSGMDYWGQGTLVTVSS

SEQ ID NO: 1693 - protein, 118 aa, Artificial Sequence
  Description of Artificial Sequence: Synthetic polypeptide
EVQLLESGGGLVQPGGSLRLSCKASGFTFSSYGMRWVRQAPGKGLEWVGRISPGGGGTYYADSFKGRFTISRDNSKNTLYLQMNSLRAEDTAVYYCARGYGSYYFDYWGQGTLVTVSS

SEQ ID NO: 1694 - protein, 117 aa, Artificial Sequence
  Description of Artificial Sequence: Synthetic polypeptide
EVQLLESGGGLVQPGGSLRLSCKASGYTFTNYAMHWVRQAPGKGLEWIGDISYSGSTNYNPSLKSRVTISRDNSKNTLYLQMNSLRAEDTAVYYCARGGGGYAMDYWGQGTLVTVSS

SEQ ID NO: 1695 - protein, 115 aa, Artificial Sequence
  Description of Artificial Sequence: Synthetic polypeptide
EVQLLESGGGMVQPGGSLRLSCKASGYTFSDYYMPWVRQAPGKGLEWVGRISPSGGTTYYADSVKGRFTISRDNSKNTLYLQMNSLRAEDTAVYYCARRYALDYWGQGTLVTVSS

SEQ ID NO: 1696 - protein, 118 aa, Artificial Sequence
  Description of Artificial Sequence: Synthetic polypeptide
EVQLLESGGGLVQPGGSLRLSCKASGYTFTNYSMHWLRQAPGKGLEWIGDISHSGSTYYNPSLKSRVTISRDNSKNTLYLQMNSLRAEDTAVYYCARYGYGGGYFDYWGQGTLVTVSS

SEQ ID NO: 1697 - protein, 118 aa, Artificial Sequence
  Description of Artificial Sequence: Synthetic polypeptide
EVQLLESGGGLVQPGGSLRLSCKASGYTFSSYWMHWVRQAPGKGLEWIGWINPGSGSTKYDQKFKGRATISRDNSKNTLYLQMNSLRAEDTAVYYCAREDRWSDFDYWGQGTLVTVSS

SEQ ID NO: 1698 - protein, 122 aa, Artificial Sequence
  Description of Artificial Sequence: Synthetic polypeptide
EVQLLESGGGLVQPGGSLRLSCKASGYTFSAYYMPWVRQAPGKGLEWIGAITHSDSTYYNPSLKSRVTISRDNSKNTLYLQMNSLRAEDTAVYYCARVSYYYGSSDWAMNDWGQGTLVTVSS

SEQ ID NO: 1699 - protein, 118 aa, Artificial Sequence
  Description of Artificial Sequence: Synthetic polypeptide
EVQLLESGGGLVQPGGSLRLSCKASGYTFTYYWMHWVRQAPGKGLEWVGRISPDGGGTYYADSVKGRFTISRDNSKNTLYLQMNSLRAEDTAVYYCARSRGYYGMDVWGQGTLVTVSS

SEQ ID NO: 1700 - protein, 116 aa, Artificial Sequence
  Description of Artificial Sequence: Synthetic polypeptide
EVQLLESGGGLVQPGGSLRLSCKASGYTFSSYWMHWVRQAPGKGLEWIGYINYSGSTNYNPSLKSRVTISRDNSKNTLYLQMNSLRAEDTAVYYCARGGYYSMDDWGQGTLVTVSS

SEQ ID NO: 1701 - protein, 122 aa, Artificial Sequence
  Description of Artificial Sequence: Synthetic polypeptide
EVQLLESGGGLVQPGGSLRLSCKASGYTFSSYAMRWVRQAPGKGLEWIGRINPGNGGTKYNEKFKGKATISRDNSKNTLYLQMNSLRAEDTAVYYCARGRYYYSTYYAMDYWGQGTLVTVSS

SEQ ID NO: 1702 - protein, 120 aa, Artificial Sequence
  Description of Artificial Sequence: Synthetic polypeptide
EVQLLESGGGLVHPGGSLRLSCKASGYTFSAYYMPWVHQAPGKGLEWIGRIDPGSGGTKYNEKFKGKATISRDNSKNTLYLQMNSLRAEDTAVYYCARDDYYGSSAMDDWGQGTLVTVSS

SEQ ID NO: 1703 - protein, 118 aa, Artificial Sequence
  Description of Artificial Sequence: Synthetic polypeptide
EVQLLESGGGLVQPGGSLRLSCKASGFTFSSYSMNWVRQAPGKGLEWIGLISYSGSTYYNPSLKSRVTISRDNSKNTLYLQMNSLRAEDTAVYYCARYAYYYDRFDYWGQGTLVTVSS

SEQ ID NO: 1704 - protein, 117 aa, Artificial Sequence
  Description of Artificial Sequence: Synthetic polypeptide
QVQLLESGGGLVQPGGSLRLSCKASGYTFTSYAMNWVRQAPGKGLEWIGRINPGSGGTKYNEKFKGKATISRDNSKNTLYLQMNSLRAEDTAVYYCARDGGDDIDYWGQGTLVTVSS

SEQ ID NO: 1705 - protein, 116 aa, Artificial Sequence
  Description of Artificial Sequence: Synthetic polypeptide
EVQLLESGGGLVQPGGSLRLSCKASGFTFSSYSMHWVRQAPGKGLEWVGRISPGGSGTYYADSVKGRFTISRDNSKNTLYLQMNSLRAEDTAVYYCARYDYGFDYWGQGTLVTVSS

SEQ ID NO: 1706 - protein, 118 aa, Artificial Sequence
  Description of Artificial Sequence: Synthetic polypeptide
KVQLLESGGGLVQPGGSLRLSCKASGFTFTSYWMNWVRQAPGKGLEWIGAISHSGSTYYNPSLKSRVTISRDNSKNTLYLQMNSLRAEDTAVYYCARGRSYYWGMDFWGQGTLVTVSS

SEQ ID NO: 1707 - protein, 118 aa, Artificial Sequence
  Description of Artificial Sequence: Synthetic polypeptide
EVQLLESGGGLVQPGGSLRLSCKASGYTFSSYSMHWVRQAPGKGLEWIGDIYYSGSTNYNPSLKSRVTISRDNSKNTLYLQMNSLRAEDTAVYYCARYGYYYGGLDYWGQGTLVTVSS

SEQ ID NO: 1708 - protein, 119 aa, Artificial Sequence
  Description of Artificial Sequence: Synthetic polypeptide
EVQLLESGGGLVQPGGSLRLSCKASGYTFSSYAMRWVRQAPGKGLEWIGWINPDSGGTKYNEKFKGRATISRDNSKNTLYLQMNSLRAEDTAVYYCARYGYYYGYLDYWGQGTLVTVSS

SEQ ID NO: 1709 - protein, 123 aa, Artificial Sequence
  Description of Artificial Sequence: Synthetic polypeptide
EVQLLESGGGLVQPGGSLRLSCKASGYTFTSYAMSWVRQAPGKGLEWIGWIDPGSGGTKYNQKFKGKATISRDNSKNTLYLQMNSLRAEDTAVYYCAHVGYYYSSSYYALDVWGQGTLVTVSS

SEQ ID NO: 1710 - protein, 118 aa, Artificial Sequence
  Description of Artificial Sequence: Synthetic polypeptide
EVQLLESGGGLVQPGGSLRLSCKASGFTFTYYWMHWVRQAPGKGLEWIGWINPNSGGTKYDEKFKGRATISRDNSKNTLYLQMNSLRAEDTAVYYCARENRWSYFDYWGQGTLVTVSS

SEQ ID NO: 1711 - protein, 122 aa, Artificial Sequence
  Description of Artificial Sequence: Synthetic polypeptide
EVQLLESGGGLVQPGGSLRLSCKASGFTFSSYAMRWVRQAPGKGLEWVGRISPSGGSTYYADSVKGRFTISRDNSKNTLYLQMNSLRAEDTAVYYCARSGFYYVYDYGLDYWGQGTLVTVSS

SEQ ID NO: 1712 - protein, 116 aa, Artificial Sequence
  Description of Artificial Sequence: Synthetic polypeptide
EVQLLESGGGLVQPGGSLRLSCKASGFTFSAYSMHWVRQAPGKGLEWVGRISPDGGGTYYADSVKGRFTISRDNSKNTLYLQMNSLRAEDTAVYYCARYRWGMAYWGQGTLVTVSS

SEQ ID NO: 1713 - protein, 119 aa, Artificial Sequence
  Description of Artificial Sequence: Synthetic polypeptide
EVQLLESGGGLVQPGGSLRLSCKASGFTFSYYSMSWVRQAPGKGLEWIGVISYSGSTYYNPSLKSRVTISRDNSKNTLYLQMNSLRAEDTAVYYCARGYSYGYYDMDYWGQGTLVTVSS

SEQ ID NO: 1714 - protein, 115 aa, Artificial Sequence
  Description of Artificial Sequence: Synthetic polypeptide
EVQLLESGGGLVQPGGSLRLSCKASGYTFSSYWMPWVRQAPGKGLEWIGLISHSGSTYYNPSLKSRVTISRDNSKNTLYLQMNSLRAEDTAVYYCARGYYGMDYWGQGTLVTVSS

SEQ ID NO: 1715 - protein, 122 aa, Artificial Sequence
  Description of Artificial Sequence: Synthetic polypeptide
EVQLLESGGGLVQPGGSLRLSCKASGYTFSSYWMRWVRQAPGKGLEWVGRINPDGGATYYADSFKGRFTISRDNSKNTLYLQMNSLRAEDTAVYYCARSGIYSVYYYGMDFWGQGTLVTVSS

SEQ ID NO: 1716 - protein, 116 aa, Artificial Sequence
  Description of Artificial Sequence: Synthetic polypeptide
EVQLLESGGGLVQPGGSLRLSCKASGYTFTSYGMNWVRQAPGKGLEWVGRISPDGGSTYYADSFKGRFTISRDNSKNTLYLQMNSLRAEDTAVYYCARYYYYMDVWGQGTLVTVSS

SEQ ID NO: 1717 - protein, 119 aa, Artificial Sequence
  Description of Artificial Sequence: Synthetic polypeptide
EVQLLESGGGLVQPGGSLRLSCKASGYTFSSYSMSWVRQAPGKGLEWIGSIYYSGSTYYNPSLKSRVTISRDNSKNTLYLQMNSLRAEDTAVYYCARDYGSGSYAFDYWGQGTLVTVSS

SEQ ID NO: 1718 - protein, 119 aa, Artificial Sequence
  Description of Artificial Sequence: Synthetic polypeptide
EVQLLESGGGLVQPGGSLRLSCKASGYTFTSYAMHWVRQAPGKGLEWVGRISPSGGGTYYADSFKGRATISRDNSKNTLYLQMNSLRAEDTAVYYCARYGGYYYGMDYWGQGTLVTVSS

SEQ ID NO: 1719 - protein, 118 aa, Artificial Sequence
  Description of Artificial Sequence: Synthetic polypeptide
EVQLLESGGGLVQPGGSLRLSCKASGYTFSSYSMPWVRQAPGKGLEWIGFINHSGSTYYNPSLKSRVTISRDNSKNTLYLQMNSLRAEDTAVYYCARYGYYYGYIDYWGQGTLVTVSS

SEQ ID NO: 1720 - protein, 116 aa, Artificial Sequence
  Description of Artificial Sequence: Synthetic polypeptide
EVQLLESGGGLVQPGGSLRLSCKASGYTFTSYSMNWVRQAPGKGLEWIGFINHSGSTYYNPSLKSRVTISRDNSKNTLYLQMNSLRAEDTAVYYCARYYGDSIDYWGQGTLVTVSS

SEQ ID NO: 1721 - protein, 118 aa, Artificial Sequence
  Description of Artificial Sequence: Synthetic polypeptide
EVQLLESGGGLVQPGGSLRLSCKASGFTFSSYSMPWVRQALGKGLEWVGRISPSGGSTYYADSVKGRFTISRDNSKNTLYLQMNSLRAEDTAVYYCARYYGYGSIDYWGQGTLVTVSS

SEQ ID NO: 1722 - protein, 116 aa, Artificial Sequence
  Description of Artificial Sequence: Synthetic polypeptide
EVQLLESGGGLVPPGGSLRLSCKASGYTFSAYSMHWVRQAPGKGLEWVGRISPSGGGTYYADSVKGRFTISRDNSKNTLYLQMNSLRAEDTAVYYCARRYSALDDWGQGTLVTVSS

SEQ ID NO: 1723 - protein, 118 aa, Artificial Sequence
  Description of Artificial Sequence: Synthetic polypeptide
EVQLLESGGGLVQPGGSLRLSCKASGFTFTDYSMNWVRQAPGKGLEWIGWIDPGNGGTKYNEKFKGKTTISRDNSKNTLYLQMNSLRAEDTAVYYCARDYGYGYMAFWGQGTLVTVSS

SEQ ID NO: 1724 - protein, 117 aa, Artificial Sequence
  Description of Artificial Sequence: Synthetic polypeptide
EVQLLESGGGLVQPGGSLRLSCKASGYTFSDYSMNWVRQAPGKGLEWVGRISPSGGSTYYADSVKGRFTISRDNSKNTLYLQMNSLRAEDTAVYYCARDGYYGMDVWGQGTLVTVSS

SEQ ID NO: 1725 - protein, 116 aa, Artificial Sequence
  Description of Artificial Sequence: Synthetic polypeptide
EVQLLESGGGLVQPGGSLRLSCKASGFTFSSYGMHWVRQAPGKGLEWVGRISPGGGGTYYADSVKGRFTISRDNSKNTLYLQMNSLRAEDTAVYYCARGRYGLADWGQGTLVTVSS

SEQ ID NO: 1726 - protein, 122 aa, Artificial Sequence
  Description of Artificial Sequence: Synthetic polypeptide
EVQLLESGGGLVQPGGSLRLSCKASGYTFTSYSMPWVRQAPGKGLEWVGRISPGGGSTYYADSVKGRFTISRDNSKNTLYLQMNSLRAEDTAVYYCARSGYGYDYYYAMDDWGQGTLVTVSS

SEQ ID NO: 1727 - protein, 116 aa, Artificial Sequence
  Description of Artificial Sequence: Synthetic polypeptide
EVQLLESGGGLVQPGGSLRLSCKASGYTFSYYSMSWVRQAPGKGLEWVGRISPGGGGTYYADSFKGRFTISRDNSKNTLYLQMHSLRAEDTAVYYCARSSYAMDDWGQGTLVTVSS

SEQ ID NO: 1728 - protein, 122 aa, Artificial Sequence
  Description of Artificial Sequence: Synthetic polypeptide
EVQLLESGGGLVQPGGSLRLSCKASGFTFSSYWMHWVRQAPGKGLEWVGRINPGGGNTYYADSVKGRFTISRDNSKNTLYLQMNSLRAEDTAVYYCARDGYGYSGYYGMDFWGQGTLVTVSS

SEQ ID NO: 1729 - protein, 117 aa, Artificial Sequence
  Description of Artificial Sequence: Synthetic polypeptide
EVQLLESGGGLVQPGGSLRLSCKASGYTFTDYYINWVRQAPGKGLEWIGRINPSSGSTKYAEKFNGRATISRDNSKNTLYLQMNSLRAEDTAVYYCARLGGDFLDYWGQGTLVTVSS

SEQ ID NO: 1730 - protein, 119 aa, Artificial Sequence
  Description of Artificial Sequence: Synthetic polypeptide
EVQLLESGGGLVQPGGSLRLSCKASGYTFSYYSMPWVRQAPGKGLEWIGWINPDSGGTNYDEKFKGRATISRDNSKNTLYLQMNSLRAEDTAVYYCARGGYGYYGLDDWGQGTLVTVSS

SEQ ID NO: 1731 - protein, 118 aa, Artificial Sequence
  Description of Artificial Sequence: Synthetic polypeptide
EVQLLESGGGLVQPGGSLRLSCKASGFTFTSYAMRWVRQAPGKGLEWVGRISPGGGSTYYADSVKGRFTISRDNSKNTLYLQMNSLRAEDTAVYYCARDGYYSAMDYWGQGTLVTVSS

SEQ ID NO: 1732 - protein, 118 aa, Artificial Sequence
  Description of Artificial Sequence: Synthetic polypeptide
EVQLLESGGGLVQPGGSLRLSCKASGYTFTSYWMHWVRQAPGKGLEWVGRISPSGDDTYYADSVKGRFTISRDNSKNTLYLQMNSLRAEDTAVYYCARSRGSYAIDVWGQGTLVTVSS

SEQ ID NO: 1733 - protein, 116 aa, Artificial Sequence
  Description of Artificial Sequence: Synthetic polypeptide
EVQLLESGGGLVQPGGSLRLSCKASGFTFTSYGMHWVRQAPGKGLEWVGRISPSGGGTYYADSVKGRFTISRDNSKNTLYLQMNSLRAEDTAVYYCARGYYGLDDWGQGTLVTVSS

SEQ ID NO: 1734 - protein, 117 aa, Artificial Sequence
  Description of Artificial Sequence: Synthetic polypeptide
EVQLLESGGGLVQPGGSLRLSCKASGYTFTSYAMHWVRQAPGKGLEWVGRISPDGGGTYYADSIKGRFTISRDNSKNTLYLQMNSLRAEDTAVYYCARYYYWGFDYWGQGTLVTVSS

SEQ ID NO: 1735 - protein, 119 aa, Artificial Sequence
  Description of Artificial Sequence: Synthetic polypeptide
EVQLLESGGGLVQPGGSLRLSCKASGFTFTSYAMPWVRQAPGKGLEWVGRISPDGGSTYYADSVKGRFTISRDNSKNTLYLQMNSLRAEDTAVYYCARYYYSPYDMDYWGQGTLVTVSS

SEQ ID NO: 1736 - protein, 118 aa, Artificial Sequence
  Description of Artificial Sequence: Synthetic polypeptide
EVQLLESGGGLVQPGGSLRLSCKASGYTFSDYWMNWVRQAPGKGLEWVGRISPSGGGTYYADSVKGRFTISRDNSKNTLYLQMNSLRAEDTAVYYCARGYYYGDFADWGQGTLVTVSS

SEQ ID NO: 1737 - protein, 120 aa, Artificial Sequence
  Description of Artificial Sequence: Synthetic polypeptide
EVQLLESGGGLVQPGGSLRLSCKASGFTFSSYYMHWVRQAPGKGLEWVGRINPDGGDTYYADSFKGRFTISRDNSKNTLYLQMNSLRAEDTAVYYCARDGYGYSYYMDYWGQGTLVTVSS

SEQ ID NO: 1738 - protein, 115 aa, Artificial Sequence
  Description of Artificial Sequence: Synthetic polypeptide
EVQLLESGGGLVQPGGSLRLSCKASGYTFTDYYMSWVRQAPGKGLEWIGVISHSGSTNYNPSLKSRVTISRDNSKNTLYLQMNSLRAEDTAVYYCARGYYGLDVWGQGTLVTVSS

SEQ ID NO: 1739 - protein, 118 aa, Artificial Sequence
  Description of Artificial Sequence: Synthetic polypeptide
EVQLLESGGGLVQPGGSLRLSCKASGFTFTDYYMSWVRQAPGKGLEWIGAIYHSGSTNYNPSLKSHVTISRDNSKNTLYLQMNSLRAEDTAVYYCARGRYYYGYIDYWGQGTLVTVSS

SEQ ID NO: 1740 - protein, 122 aa, Artificial Sequence
  Description of Artificial Sequence: Synthetic polypeptide
EVQLLESGGGLVQPGGSLRLSCKASGFTFTSYWMHWVRQAPGKGLEWVGRISPGGGSTYYAASVKGRFTISRDNSKNTLYLQMNSLRAEDTAVYYCARSRIGYDYDYGMDYWSQGTLVTVSS

SEQ ID NO: 1741 - protein, 121 aa, Artificial Sequence
  Description of Artificial Sequence: Synthetic polypeptide
EVQLLESGGGLVQPGGSLRLSCKASGYTFTNYWMNWVRQAPGKGLEWIGRIDPSNGGTKYNEKFKGKATISRDNSKNTLYLQMNSLRAEDTAVYYCARDRYGYRYYDLDYWGQGTLVTVSS

SEQ ID NO: 1742 - protein, 122 aa, Artificial Sequence
  Description of Artificial Sequence: Synthetic polypeptide
EVQLLESGGGLVQPGGSLRLSCKASGYTFTGYSINWVRQAPGKGLEWVGRINPGGGGTYYADYFKGRFTISRDNSKNTLYLQMNSLRAEDTAVYYCARDLYFNGYYYGFDYWGQGTLVTVSS

SEQ ID NO: 1743 - protein, 119 aa, Artificial Sequence
  Description of Artificial Sequence: Synthetic polypeptide
EVQLLESGGGLVQPGGSLRLSCKASGFTFTSYSMPWVRQAPGKGLEWIGRINPGNGGTKYNQKFKGKATISRDNSKNTLYLQMNSLCAEDTAVYYCARYYGGSYGLDFWGQGTLVTVSS

SEQ ID NO: 1744 - protein, 121 aa, Artificial Sequence
  Description of Artificial Sequence: Synthetic polypeptide
EVQLLESGGGLVQPGGSLRLSCKASGFTFSSYSMNWVRQAPGKGLEWIGDISYSGSTNYNPSLKSRVTISRDNSKNTLYLQMNSLRAEDTAVYYCARSGISYVYYYGMDFWGQGTLVTVSS

SEQ ID NO: 1745 - protein, 115 aa, Artificial Sequence
  Description of Artificial Sequence: Synthetic polypeptide
EVQLLESGGGLVQPGGSLRLSCKASGYTFSSYYMSWVRQAPGKGLEWIGVISHSGSTYYNPSLKSRVTISRDNSKNTLYLQMNSLRAEDTAVYYCARGYYGMDYWGQGTLVTVSS

SEQ ID NO: 1746 - protein, 119 aa, Artificial Sequence
  Description of Artificial Sequence: Synthetic polypeptide
EVQLLESGGGLVQPGGSLRLSCKASGYTFTSYSMSWVRQAPGKGLEWIGWINPDSGSTNYNEKFKGRATISRDNSKNTLYLQMNSLRAEDTAVYYCARDYHYYYAFDFWGQGTLVTVSS

SEQ ID NO: 1747 - protein, 119 aa, Artificial Sequence
  Description of Artificial Sequence: Synthetic polypeptide
EVQLLESGGGLVQPGGSLRLSCKASGFTFSSYSMSWVRQAPGKGLEWIGWINPDSGSTKYDEKFKGRATISRDNSKNTLYLQMNSLRAEDTAVYYCARGRYGYGRLDDWGQGTLVTVSS

SEQ ID NO: 1748 - protein, 119 aa, Artificial Sequence
  Description of Artificial Sequence: Synthetic polypeptide
EVQLLESGGGLVQPGGSLRLSCKASGFTFSSYSMNWVRQAPGKGLEWIGDITYSGSTYYNPSLKSRVTISRDNSKNTLYLQMNSLRAEDTAVYYCARSHYYYGYTFDYWGQGTLVTVSS

SEQ ID NO: 1749 - protein, 119 aa, Artificial Sequence
  Description of Artificial Sequence: Synthetic polypeptide
EVQLLESGGGLVQPGGSLRLSCKASGFTFSYYYMSWVRQAPGKGLEWIGWIDPGSGGTKYNQKFKGKATISRDNSKNTLYLQMNSLRAEDTAVYYCARGDYLYWDFDFWGQGTLVTVSS

SEQ ID NO: 1750 - protein, 118 aa, Artificial Sequence
  Description of Artificial Sequence: Synthetic polypeptide
EVQLLESGGGLVQPGGSLRLSCKASGYTFTNYAMNWVRQAPGKGLEWIGVITHSGSTYYNPSLKSRVTISRDNSKNTLYLQMNSLRAEDTAVYYCARGDRFYWAFDVWGQGTLVTVSS

SEQ ID NO: 1751 - protein, 117 aa, Artificial Sequence
  Description of Artificial Sequence: Synthetic polypeptide
EVQLLESGGGLVQPGGSLRLSCKASGFTFSSYSMSWVRQAPGKGLEWIGWINPDSGSTKYTEKFKGRATISRDNSKNTLYLQMNSLRAEDTAVYYCARFGSSALDYWGQGTLVTVSS

SEQ ID NO: 1752 - protein, 116 aa, Artificial Sequence
  Description of Artificial Sequence: Synthetic polypeptide
EVQLLESGGGLVQPGGSLRLSCKASGFTFTSYWMSWVRQAPGKGLEWIGYINYSGSTYYNPSLKSRVTISRDNSKNTLYLQMNSLRAEDTAVYYCARYDGDYIDYWGQGTLVTVSS

SEQ ID NO: 1753 - protein, 115 aa, Artificial Sequence
  Description of Artificial Sequence: Synthetic polypeptide
EVQLLESGGGLVQPGGSLRLSCKASGFTFSDYYMSWVRQAPGKGLEWIGAISYSGSTYYNPSLKSRVTISRDNSKNTLYLQMNSLRAEDTAVYYCARGYYGMDYWGQGTLVTVSS

SEQ ID NO: 1754 - protein, 118 aa, Artificial Sequence
  Description of Artificial Sequence: Synthetic polypeptide
EVQLLESGGGLVQPGGSLRLSCKASGYTFSAYSMPWVRQAPGKGLEWIGEITYSGSTNYNPSLKSRVTISRDNSKNTLYLQMNSLRAEDTAVYYCARDGYYYGYIDYWGQGTLVTVSS

SEQ ID NO: 1755 - protein, 117 aa, Artificial Sequence
  Description of Artificial Sequence: Synthetic polypeptide
EVQLLESGGGLVQPGGSLRLSCKASGYTFSYYSMHWVRQAPGKGLEWVGRISPDGGGTYYADSVKGRFTISRDNSKNTLYLQMNSLRAEDTAVYYCARVGYYGLDFWGQGTLVTVSS

SEQ ID NO: 1756 - protein, 118 aa, Artificial Sequence
  Description of Artificial Sequence: Synthetic polypeptide
EVQLLESGGGLVQPGGSLRLSCKASGFTFSSYSMYWVRQAPGKGLEWIGRIDPSSGGTKYNEKFKGKATISRDNSKNTLYLQMNSLRAEDTAVYYCARYGGYWAMDYWGQGTLVTVSS

SEQ ID NO: 1757 - protein, 119 aa, Artificial Sequence
  Description of Artificial Sequence: Synthetic polypeptide
EVQLLESGGGLVQPGGSLRLSCKASGYTFTSYWMSWVRQAPGKGLEWIGRINPDSGSTKYNEKFKGRATISRDNSKNTLYLQMNSLRAEDTAVYYCARGGGGGYGMDDWGQGTLVTVSS

SEQ ID NO: 1758 - protein, 122 aa, Artificial Sequence
  Description of Artificial Sequence: Synthetic polypeptide
EVQLLESGGGLVQPGGSLRLSCKASGFTFSSYSMSWVRQAPGKGLEWIGWINPSSGGTKYNQKFKGRATISRDNSKNTLYLQMNSLRAEDTAVYYCARDGTAYSYYWGLDYWGQGTLVTVSS

SEQ ID NO: 1759 - protein, 122 aa, Artificial Sequence
  Description of Artificial Sequence: Synthetic polypeptide
EVQLLESGGGLVQPGGSLRLSCKASGYTFTSYAMPWVRQAPGKGLEWVGRISPSGGGTYYADSVKGRFTISRDNSKNTLYLQMNSLRAEDTAVYYCARSRFGSDYYYGMDYWGQGTLVTVSS

SEQ ID NO: 1760 - protein, 119 aa, Artificial Sequence
  Description of Artificial Sequence: Synthetic polypeptide
EVQLLESGGGLVKPGGSLRLSCKASGYTFSSYYMSWVRQAPGKGLEWIGWIDPGNGGTNYNQKFKGKATISRDNSKNTLYLQMNSLRAEDTAVYYCARYGYYYGYLDYWGQGTLVTVSS

SEQ ID NO: 1761 - protein, 117 aa, Artificial Sequence
  Description of Artificial Sequence: Synthetic polypeptide
EVQLLESGGGLVQPGGSLRLSCKASGYTFSSYSMNWVRQAPGKGLEWIGRINPNSGSTNYNEKFKGRATISRDNSKNTLYLQMNSLRAEDTAVYYCARRDGYSFDYWGQGTLVTVSS

SEQ ID NO: 1762 - protein, 116 aa, Artificial Sequence
  Description of Artificial Sequence: Synthetic polypeptide
EVQLLESGGGLVQPGGSLRLSCKASGFTFSYYSMYWVRQAPGKGLEWVGRISPGGGGTYYADSVKGRFTISRDNSKNTLYLQMNSLRAEDTAVYYCARGRWAMDYWGQGTLVTVSS

SEQ ID NO: 1763 - protein, 118 aa, Artificial Sequence
  Description of Artificial Sequence: Synthetic polypeptide
EVQLLESGGGLVQPGGSLRLSCKASGYTFTNYWMNWVRQAPGKGLEWVGRISPSGGGTYYADSFKGRATISRDNSKNTLYLQMNSLRAEDTAVYYCARGYYYGDFAFWGQGTLVTVSS

SEQ ID NO: 1764 - protein, 119 aa, Artificial Sequence
  Description of Artificial Sequence: Synthetic polypeptide
EVQLLESGGGLVQPGGSLRLSCKASGYTFSYYYMSWVRQAPGKGLEWIGWINPDSGGTKYNQKFKGRATISRDNSKNTLYLQMNSLRAEDTAVYYCARSGFYYYGMDYWGQGTLVTVSS

SEQ ID NO: 1765 - protein, 114 aa, Artificial Sequence
  Description of Artificial Sequence: Synthetic polypeptide
EVQLLESGGGLVQPGGSLRLSCKASGFTFSDYYMSWVRQAPGKGLEWIGYISYSGSTYYNPSLKSRVTISRDNSKNTLYLQMNLRAEDTAVYYCARGGYGFDYWGQGTLVTVSS

SEQ ID NO: 1766 - protein, 117 aa, Artificial Sequence
  Description of Artificial Sequence: Synthetic polypeptide
EVQLLESGGGLVQPGGSLRLSCKASGFTFTSYWMHWVRQAPGKGLEWIGRINPSSGSTNYDEKFKGRATISRDNSKNTLYLQMNSLRAEDTAVYYCARDYGYDMDYWGQGTLVTVSS

SEQ ID NO: 1767 - protein, 122 aa, Artificial Sequence
  Description of Artificial Sequence: Synthetic polypeptide
EVQLLESGGGLVQPGGSLRLSCKASGYTFSSYAMSWVRQGPGKGLEWVGRINPDGGNTYYADSVKGRFTISRDNSKNTLYLQMNSLRAEDTAVYYCARSGYYYVYDYAMDDWGQGTLVTVSS

SEQ ID NO: 1768 - protein, 117 aa, Artificial Sequence
  Description of Artificial Sequence: Synthetic polypeptide
EVQLLESGGGLVQPGGSLRLSCKASGYTFSYYSIHWVRQAPGKGLEWVGRISPGGGSTYYADSFKGRFTISRDNSKNTLYLQMNSLRAEDTAVYYCARYGYYGMDFWGQGTLVTVSS

SEQ ID NO: 1769 - protein, 119 aa, Artificial Sequence
  Description of Artificial Sequence: Synthetic polypeptide
EVQLLESGGGLVQPGGSLRLSCKASGFTFSAYAMRWVRQAPGKGLEWIGLISHSGSTNYNPSLKSRVTISRDNSKNTLYLQMNSLRAEDTAVYYCARDYYYGGYDLDYWGQGTLVTVSS

SEQ ID NO: 1770 - protein, 118 aa, Artificial Sequence
  Description of Artificial Sequence: Synthetic polypeptide
EVQLLKSGGGLVQPGGSLRLSCKASGFTFTDYYMSWVRQAPGKGLEWIGDIYHSGSTYYNPSLKSRVTISRDNSKNTLYLQMNSLRAEDTAVYYCARDGGGYSDFAFWGQGTLVTVSS

SEQ ID NO: 1771 - protein, 117 aa, Artificial Sequence
  Description of Artificial Sequence: Synthetic polypeptide
EVQLLESGGGLVQPGGSLRLSCKASGFTFSSYYMPWVRQAPGKGLEWVGRISPGGGGTYYAASVKGRFTISRDNSKNTLYLQMNSLRAEDTAVYYCARGSRYAFDYWGQGTLVTVSS

SEQ ID NO: 1772 - protein, 109 aa, Artificial Sequence
  Description of Artificial Sequence: Synthetic polypeptide
DIQMTQSPSSLSASVGDRVTITCRASQSVSNYLNWYQQKPGKAPKLLIYAASSLQSGVPSRFSGSGSGTDFTLTISSLQSEDFATYYCQSWDSSLYNDVFGGGTKVEIK

SEQ ID NO: 1773 - protein, 108 aa, Artificial Sequence
  Description of Artificial Sequence: Synthetic polypeptide
DIQMTQSPSSLSASVGDRVTITCRASQAVSNYLDWYQQKPGKAPKLLIYAASSLQSGVPSRFSGSGSGTDFTLTISSLQPEDFATYYCQSYDSSSTLAFGGGTKVEIK

SEQ ID NO: 1774 - protein, 107 aa, Artificial Sequence
  Description of Artificial Sequence: Synthetic polypeptide
DIQMTQSPSSLSASVGDRVTITCRASQDISKYLDWYQQKPGKAPKLLIYAASSLQSGVPSRFSGSGSGTDFTLTISSLQPEDFATYYCQQYYSYPLIFGGGTKVEIK

SEQ ID NO: 1775 - protein, 109 aa, Artificial Sequence
  Description of Artificial Sequence: Synthetic polypeptide
DIQMTQSPSSLSASVGDRVTITCRASQAVSKYLDWYQQKPGKAPKLLIYAASSLQSGVPSRFSGSGSGTDFTLTISSLQPEDFATYYCQSWDASSGHLVFGGGTKVEIK

SEQ ID NO: 1776 - protein, 109 aa, Artificial Sequence
  Description of Artificial Sequence: Synthetic polypeptide
DIQMTQSPSSLSASVGDRVTITCRASQYVSTYLDWYQQKPGKAPKLLIYAASSLQSGVPSRFSGSGSGTDFTLTISSLQPEDFATYYCQSYDSSGNRDVFGGGTKVEIK

SEQ ID NO: 1777 - protein, 109 aa, Artificial Sequence
  Description of Artificial Sequence: Synthetic polypeptide
DIQMTQSPSSLSASVGDRVTITCRASQYVSRYLAWYQQKPGKAPKLLIYAASSLQSGVPSRFSGSGSGTDFTLTISSLQPEDFATYYCAAWDYSLSHYVFGGGTKVEIK

SEQ ID NO: 1778 - protein, 109 aa, Artificial Sequence
  Description of Artificial Sequence: Synthetic polypeptide
DIQMTQSPSSLSASVGDRVTITCRASQYVSSYLNWYQQKPGKAPKLLIYAASSLQSGVPSRFSGSGSGTDFTLTISSLQPEDFATYYCQSWDYSLGGWVFGGGTKVEIK

SEQ ID NO: 1779 - protein, 109 aa, Artificial Sequence
  Description of Artificial Sequence: Synthetic polypeptide
DIQMTQSPSSLSASVGDRVTITCRASQDVSKYLDWYQQKPGKAPKLLIYAASSLQSGVPSRFSGSGSGTDFTLTISSLQPEDFATYYCQAWDYSSDRGVFGGGTKVEIK

SEQ ID NO: 1780 - protein, 108 aa, Artificial Sequence
  Description of Artificial Sequence: Synthetic polypeptide
DIQMTQSPSSLSASVGDRVTITCRASQYISRYLDWYQQKPGKAPKLLIYAASSLQSGVPSRFSGSGSGTDFTLTISSLQPEDFATYYCQPYDGSYPLVFGGGTKVEIK

SEQ ID NO: 1781 - protein, 109 aa, Artificial Sequence
  Description of Artificial Sequence: Synthetic polypeptide
DIQMTQSPSSLSASVGDRVTITCRASQDVSSYLTWYQQKPGKAPKLLIYAASSLQSGVPSRFSGSGSGTDFTLTISSLQPEDFATYYCQSWDSSVHGDVFGGGTKVEIK

SEQ ID NO: 1782 - protein, 108 aa, Artificial Sequence
  Description of Artificial Sequence: Synthetic polypeptide
DIQMTQSPSSLSASVGDRVTITCRASQAISSYLAWYQQKPGKAPKLLIYAASSLQSGVPSRFSGSGSGTDFTLTISSLQPEDFATYYCQLYDGSPPGVFGGGTKVEIK

SEQ ID NO: 1783 - protein, 109 aa, Artificial Sequence
  Description of Artificial Sequence: Synthetic polypeptide
DIQMTQSPSSLSASVGDRVTITCRASQDVSKYLTWYQQKPGKAPKLLIYAASSLQSGVPSRFSGSGSGTDFTLTISSLQPEDFATYYCESYDYSLNQYVFGGGTKVEIK

SEQ ID NO: 1784 - protein, 109 aa, Artificial Sequence
  Description of Artificial Sequence: Synthetic polypeptide
DIQMTQSPSSLSASVGDRVTITCRASQDVSSYLHWYQQKPGKAPKLLIYAASSLQSGVPSRFSGSGSGTDFTLTISSLQPEDFATYYCQSYDSSVNGDVFGGGTKVEIK

SEQ ID NO: 1785 - protein, 109 aa, Artificial Sequence
  Description of Artificial Sequence: Synthetic polypeptide
DIQMTQSPSSLSASVGDRVTITCRASQDVSTYLAWYQQKPGKAPKLLIYAASSLQSGVPSRFSGSGSGTDFTLTISSLQPEDFATYYCQSWDSSLALDVFGGGTKVEIK

SEQ ID NO: 1786 - protein, 108 aa, Artificial Sequence
  Description of Artificial Sequence: Synthetic polypeptide
DIQMTQSPSSLSASVGDRVTITCRASQYISTYLDWYQQKPGKAPKLLIYAASSLQSGVPSRFSGSGSGTDFTLTISSLQPEDFATYYCQAWDGSYPVVFGGGTKVEIK

SEQ ID NO: 1787 - protein, 108 aa, Artificial Sequence
  Description of Artificial Sequence: Synthetic polypeptide
DIQMTQSPSSLSASVGDRVTITCRASQDISKYLNWYQQKPGKAPKLLIYAASSLQSGVPSRFSGSGSGTDFTLTISSLQPEDFATYYCQSWDSSPPFVFGDGTKVEIK

SEQ ID NO: 1788 - protein, 109 aa, Artificial Sequence
  Description of Artificial Sequence: Synthetic polypeptide
DIQMTQSPSSLSASVGDRVTITCRASQDVSTYLNWYQQKPGKAPKLLIYAASSLQSGVPSRFSGSGSGTDFTLTISSLQPEDFATYYCQSWDNSLSVDVFGGGTKVEIK

SEQ ID NO: 1789 - protein, 109 aa, Artificial Sequence
  Description of Artificial Sequence: Synthetic polypeptide
DIQMTQSPSSLSASVGDRVTITCRASQAVSRYLHWYQQKPGKAPKLLIYAASSLQSGVPSRFSGSGSGTDFTLTISSLQPEDFATYYCPAWDSSLGGWVFGGGTKVEIK

SEQ ID NO: 1790 - protein, 109 aa, Artificial Sequence
  Description of Artificial Sequence: Synthetic polypeptide
DIQMTQSPSSLSASVGDRVTITCRASQAVSRYLNWYQQKPGKAPKLLIYAASSLQSGVPSRFSGSGSGTDFTLTISSLQPEDFATYYCQSWDNSASHDVFGGGTKVEIK

SEQ ID NO: 1791 - protein, 106 aa, Artificial Sequence
  Description of Artificial Sequence: Synthetic polypeptide
DIQMTQSPSSLSASVGDRVTITCRASQAVSSYLNWYQQKPGKAPKLLIYAASSLQSGVPSRFSGSGSGTDFTLTISSLQPEDFATYYCQQSASYWTFGGGTKVEIK

SEQ ID NO: 1792 - protein, 109 aa, Artificial Sequence
  Description of Artificial Sequence: Synthetic polypeptide
DIQMTQSPSSLSASVGDRVTITCRASQYVSSYLNWYQQKPGKAPKLLIYAASSLQSGVPSRFSGSGSGTDFTLTISSLQPEDFATYYCQAWDSSLDSVVFGGGTKVEIK

SEQ ID NO: 1793 - protein, 109 aa, Artificial Sequence
  Description of Artificial Sequence: Synthetic polypeptide
DIQMTQSPSSLSASVGDRVTITCRASQDVSKYLAWYQQKPGKAPKLLIYAASSLQSGVPSRFSGSGSGTDFTLTISSLQPEDFATYYCQSWDSSRPLDVFGGGTKVEIK

SEQ ID NO: 1794 - protein, 109 aa, Artificial Sequence
  Description of Artificial Sequence: Synthetic polypeptide
DIQMTQSPSSLSASVGDRVTITCRASQSISKYLDWYQQKPGKAPKLLIYAASSLQSGVPSRFSGSGSGTDFTLTISSLQPEDFATYYCAAWDDSLDPGVFGGGTKVEIK

SEQ ID NO: 1795 - protein, 109 aa, Artificial Sequence
  Description of Artificial Sequence: Synthetic polypeptide
DIQMTQSPSSLSASVGDRVTITCRASQAVSTYLAWYQQKPGKAPKLLIYAASSLQSGVPSRFSGSGSGTDFTLTISSLQPEDFATYYCQSWDNSSTGVVFGGGTKVEIK

SEQ ID NO: 1796 - protein, 108 aa, Artificial Sequence
  Description of Artificial Sequence: Synthetic polypeptide
DIQMTQSPSSLSASVGDRVTITCRASQAVSSYLDWYQQKPGKAPKLLIYAASSLQSGVPSRFSGSGSGTDFTLTISSLQPEDFATYYCQSYNSSNPGAFGGGTKVEIK

SEQ ID NO: 1797 - protein, 109 aa, Artificial Sequence
  Description of Artificial Sequence: Synthetic polypeptide
DIQMTQSPSSLSASVGDRVTITCRASQSVSSYLDWYQQKPGKAPKLLIYAASSLQSGLPSRFSGSGSGTDFTLTISSLQPEDFATYYCEAYDYSSSAWVFGGGTKVEIK

SEQ ID NO: 1798 - protein, 109 aa, Artificial Sequence
  Description of Artificial Sequence: Synthetic polypeptide
DIQMTQSPSSLSASVGDRVTITCRASQAVSSYLHWYQQKPGKAPKLLIYAASSLQSGVPSRFSGSGSGTDFTLTISSLQPEDFATYYCEAWDASSGRYVFGGGTKVEIK

SEQ ID NO: 1799 - protein, 109 aa, Artificial Sequence
  Description of Artificial Sequence: Synthetic polypeptide
DIQMTQSPSSLSASVGDRVTITCRASQAISTYLTWYQQKPGKAPKLLIYAASSLQSGVQSRFSGSGSGTDFTLTISSLQPEDFATYYCASWDSSANHDVFGGGTKVEIK

SEQ ID NO: 1800 - protein, 109 aa, Artificial Sequence
  Description of Artificial Sequence: Synthetic polypeptide
DIQMTQSPSSLSASVGDRVTITCRASQAVSRYLTWYQQKPGKAPKLLIYAASSLQSGVPSRFSGSGSGTDFTLTISSLQPEDFATYYCQSYDNSRDGDVFGGGTKVEIK

SEQ ID NO: 1801 - protein, 108 aa, Artificial Sequence
  Description of Artificial Sequence: Synthetic polypeptide
DIQMTQSPSSLSASVGDRVTITCRASQSISSYLDWYQQKPGKAPKLLIYAASSLQSGVPSRFSGSGSGTDFTLTISSLQPEDFATYYCQAWDGSSTFVFGGGTKVEIK

SEQ ID NO: 1802 - protein, 107 aa, Artificial Sequence
  Description of Artificial Sequence: Synthetic polypeptide
DIQMTQSPSSLSASVGDRVTITCRASQAVSKYLNWYQQKPGKAPKLLIYAASSLQSGVPSRFSGSGTDFTLTISSLQPEDFATYYCQAYDDSLSDWVFGGGTKVEIK

SEQ ID NO: 1803 - protein, 108 aa, Artificial Sequence
  Description of Artificial Sequence: Synthetic polypeptide
DIQMTQSPSSLSASVGDRVTITCRASQDVSSYLDWYQQKPGKAPKLLIYAASSLQSGVPSRFSGSGSGTDFTLTISSLQPEDFATYYCQAYDGSHTFVFGGGTKVEIK

SEQ ID NO: 1804 - protein, 107 aa, Artificial Sequence
  Description of Artificial Sequence: Synthetic polypeptide
DIQMTQSPSSLSASVGDRVTITCRASQDVSSYLNWYQQKPGKAPKLLIYAASSLQSGVPSRFSGSGSGTDFTLTISSLQPEDFATYYCQQGSSLPFTFGGGTKVEIK

SEQ ID NO: 1805 - protein, 109 aa, Artificial Sequence
  Description of Artificial Sequence: Synthetic polypeptide
DIQMTQSPSSLSASVGDRVTITCRASQAISKYLAWYQQKPGKAPKLLIYAASSLQSGVPSRFSGSGSGTDFTLTISSLQPEDFATYYCASWDASSNAYVFGGGTKVEIK

SEQ ID NO: 1806 - protein, 109 aa, Artificial Sequence
  Description of Artificial Sequence: Synthetic polypeptide
DIQMTQSPSSLSASVGDRVTITCRASQDVSKYLTWYQQKPGKAPKLLIYAASSLQSGVPSRFSGSGSGTDFTLTISSLQPEDFATYYCESYDASSGDVVFGGGTKVEIK

SEQ ID NO: 1807 - protein, 108 aa, Artificial Sequence
  Description of Artificial Sequence: Synthetic polypeptide
DIQMTQSPSSLSASVGDRVTITCRASQDISTYLAWYQQKPGKAPKLLIYAASSLQSGVPSRFSGSGSGTDFTLTISSLQPEDFATYYCQPWDGSHTFTFGGGTKVEIK

SEQ ID NO: 1808 - protein, 109 aa, Artificial Sequence
  Description of Artificial Sequence: Synthetic polypeptide
DIQMTQSPSSLSASVGDRVTITCRASQDVSTYLNWYQQKPGKAPKLLIYAASSLQSGVPSRFSGSGSGTDFTLTISSLQPEDFATYYCEAWDDSSGGWVFGGGTKVEIK

SEQ ID NO: 1809 - protein, 109 aa, Artificial Sequence
  Description of Artificial Sequence: Synthetic polypeptide
DIQMTQSPSSLSASVGDRVTITCRASQDISTYLDWYQQKPGKAPKLLIYAASSLQSGVPSRFSGSGSGTDFTLTISSLQPEDFATYYCESWDYSLGAYVFGGGTKVEIK

SEQ ID NO: 1810 - protein, 108 aa, Artificial Sequence
  Description of Artificial Sequence: Synthetic polypeptide
DIQMTQSPSSLSASVGDRVTITCRASQDVSRYLAWYQQKPGKAPKLLIYAASSLQSGVPSRFSGSGSGTDFTLTISSLQPEDFATYYCQAYDGSPPLVFGGGTKVEIK

SEQ ID NO: 1811 - protein, 109 aa, Artificial Sequence
  Description of Artificial Sequence: Synthetic polypeptide
DIQMTQSPSSLSASVGDRVTITCRASQDVSSYLDWYQQKPGKAPKLLIYAASSLQSGVPSRFSGSGSGTDFTLTISSLQPEDFATYYCESWDYSSDDYVFGGGTKVEIK

SEQ ID NO: 1812 - protein, 108 aa, Artificial Sequence
  Description of Artificial Sequence: Synthetic polypeptide
DIQMTQSPSSLSASVGDRVTITCRASQDVSKYLDWYQQKPGKAPKLLIYAASSLQSGVPSRFSGSGSGTDFTLTISSLQPEDFATYYCSPYDSSPSLVFGGGTKVEIK

SEQ ID NO: 1813 - protein, 108 aa, Artificial Sequence
  Description of Artificial Sequence: Synthetic polypeptide
DIQMTQSPSSLSASVGDRVTITCRASQSVSRYLDWYQQKPGKAPKLLIYAASSLQSGVPSRFSGSGSGTDFTLTISSLQPEDFATYYCQSWDSSPTLVFGGGTKVEIK

SEQ ID NO: 1814 - protein, 107 aa, Artificial Sequence
  Description of Artificial Sequence: Synthetic polypeptide
DIQMTQSPSSLSASVGDRVTITCRASQYVSSYLDWYQQKPGKAPKLLIYAASSLQSGVPSRFSGSGSGTDFTLTISSLQPEDFATYYCQQSDSYPSTFGGGTKVEIK

SEQ ID NO: 1815 - protein, 109 aa, Artificial Sequence
  Description of Artificial Sequence: Synthetic polypeptide
DIQMTQSPSSLSASVGDRVTITCRASQDISSYLAWYQQKPGKAPKLLIYAASSLQSGVPSRFSGSGSGTDFTLTISSLQPEDFATYYCQSYDNSRTVDVFGGGTKVEIK

SEQ ID NO: 1816 - protein, 109 aa, Artificial Sequence
  Description of Artificial Sequence: Synthetic polypeptide
DIQMTQSPSSLSASVGDRVTITCRASQSVSKYLDWYQQKPGKAPKLLIYAASSLQSGVPSRFSGSGSGTDFTLTISSLQPEDFATYYCQSYDNSAYIDVFGGGTKVEIK

SEQ ID NO: 1817 - protein, 109 aa, Artificial Sequence
  Description of Artificial Sequence: Synthetic polypeptide
DIQMTQSPSSLSASVGDRVTITCRASQSISSYLTWYQQKPGKAPKLLIYAASSLQSGVPSRFSGSGSGTDFTLTISSLQPEDFATYYCESWDYSLDGYVFGGGTKVEIK

SEQ ID NO: 1818 - protein, 109 aa, Artificial Sequence
  Description of Artificial Sequence: Synthetic polypeptide
DIQMTQSPSSLSASVGDRVTITCRASQYVSNYLDWYQQKPGKAPKLLIYAASSLQSGVPSRFSGSGSGTDFTLTISSLQPEDFATYYCEAYDASSGPVVFGGGTKVEIK

SEQ ID NO: 1819 - protein, 109 aa, Artificial Sequence
  Description of Artificial Sequence: Synthetic polypeptide
DIQMTQSPSSLSASVGDRVTITCRASQAVSTYLHWYQQKPGKAPKLLIYAASSLQSGVPSRFSGSGSGTDFTLTISSLQPEDFATYYCQSWDSSLDAFVFGGGTKVEIK

SEQ ID NO: 1820 - protein, 109 aa, Artificial Sequence
  Description of Artificial Sequence: Synthetic polypeptide
DIQMTQSPSSLSASVGDRVTITCRASQDVSSYLNWYQQKPGKAPKLLIYAASSLQSGVPSRFSGSGSGTDFTLTISSLQPEDFATYYCQSWDSSVDIDVFGGGTKVEIK

SEQ ID NO: 1821 - protein, 109 aa, Artificial Sequence
  Description of Artificial Sequence: Synthetic polypeptide
DIQMTQSPSSLSASVGDRVTITCRASQDVSRYLAWYQQKPGKAPKLLIYAASSLQSGVPSRFSGSGSGTDFTLTISSLQPEDFATYYCQSWDGSSPTGTFGGGTKVEIK

SEQ ID NO: 1822 - protein, 109 aa, Artificial Sequence
  Description of Artificial Sequence: Synthetic polypeptide
DIQMTQSPSSLSASVGDRVTITCRASQDISRYLAWYQQKPGKAPKLLIYAASSLQSGVPSRFSGSGSGTDFTLTISSLQPEDFATYYCAAYDSSGAHVVFGGGTKVEIK

SEQ ID NO: 1823 - protein, 106 aa, Artificial Sequence
  Description of Artificial Sequence: Synthetic polypeptide
DIQMTQSPSSLSASVGDRVTITCRASQAISRYLNWYQQKPGKAPKLLIYAASSLQSGVPSRFSGSGSGTDFTLTISSLQPEDFATYYCQQYDSPFTFGGGTKVEIK

SEQ ID NO: 1824 - protein, 107 aa, Artificial Sequence
  Description of Artificial Sequence: Synthetic polypeptide
DIQMTQSPSSLSASVGDRVTITCRASQYVSKYLNWYQQKPGKAPKLLIYAASSLQSGVPSRFSGSGSGTDLTLTISSLQPEDFATYYCQQSYSAPWTFGGGTKVEIK

SEQ ID NO: 1825 - protein, 107 aa, Artificial Sequence
  Description of Artificial Sequence: Synthetic polypeptide
DIQMTQSPSSLSASVGDRVTITCRASQDVSTYLNWYQQKPGKAPKLLIYAASSLQSGVPSRFSGSGSGTDFTLTISSLQPEDFATYYCQQAYSFPSTFGGGTKVEIK

SEQ ID NO: 1826 - protein, 109 aa, Artificial Sequence
  Description of Artificial Sequence: Synthetic polypeptide
DIQMTQSPSSLSASVGDRVTITCRASQDVSKYLNWYQQKPGKAPKLLIYAASSLQSGVPSRFSGSGSGTDFTLTISSLQPEDFATYYCESYDYSSGDLVFGGGTKVEIK

SEQ ID NO: 1827 - protein, 109 aa, Artificial Sequence
  Description of Artificial Sequence: Synthetic polypeptide
DIQMTQSPSSLSASVGDRVTITCRASQAVSRYLTWYQQKPGKAPKLLIYAASSLQSGVPSRFSGSGSGTDFTLTISSLQPEDFATYYCASWDDSLNGLVFGGGTKVEIK

SEQ ID NO: 1828 - protein, 108 aa, Artificial Sequence
  Description of Artificial Sequence: Synthetic polypeptide
DIQMTQSPSSLSASVGDRVTIPCRASQYVSTYLDWYQQKPGKAPKLLIYAASSLQSGVPSRFSGSGSGTDFTLTISSLQPEDFATYYCQAYDGSYPLVFGGGTKVEIK

SEQ ID NO: 1829 - protein, 109 aa, Artificial Sequence
  Description of Artificial Sequence: Synthetic polypeptide
DIQMTQSPSSLSASVGDRVTITCRASQDVSSYLAWYQQKPGKAPKLLIYAASSLQSGVPSRFSGSGSGTDFTLTISSLQPEDFATYYCAAYDASSGGLVFGGGTKVEIK

SEQ ID NO: 1830 - protein, 109 aa, Artificial Sequence
  Description of Artificial Sequence: Synthetic polypeptide
DIQMTQSPSSLSASVGDRVTITCRASQAISSYLNWYQQKPGKAPKLLIYAASSLQSGVPSRFSGSGSGTDFTLTISSLQPEDFATYYCEAWDNSLNLDVFGGGTKVEIK

SEQ ID NO: 1831 - protein, 107 aa, Artificial Sequence
  Description of Artificial Sequence: Synthetic polypeptide
DIQMTQSPSSLSASVGDRVTITCRASQAISSYLNWYQQKPGKAPKLLIYAASSLQSGVPSRFSGSGSGTDFTLTISSLQPEDFATYYCSPYDSSTFMFGGGTKVEIK

SEQ ID NO: 1832 - protein, 109 aa, Artificial Sequence
  Description of Artificial Sequence: Synthetic polypeptide
DIQMTQSPSSLSASVGDRVTITCRASQAVSRYLDWYQQKPGKAPKLLIYAASSLQSGVPSRFSGSGSGTDFTLTISSLQPEDFATYYCEAYDDSSGAYVFGGGTKVEIK

SEQ ID NO: 1833 - protein, 108 aa, Artificial Sequence
  Description of Artificial Sequence: Synthetic polypeptide
DIQMTQSPSSLSASVGDRVTITCRASQSISTYLAWYQQKPGKAPKLLIYAASSLQSGVPSRFSGSGSGTDFTLTISSLQPEDFATYYCQSWDGSHPLAFGGGTKVEIK

SEQ ID NO: 1834 - protein, 109 aa, Artificial Sequence
  Description of Artificial Sequence: Synthetic polypeptide
DIQMTQSPSSLSASVGDRVTITCRASQYVSRYLDWYQQKPGKAPKLLIYAASSLQSGVPSRFSGSGSGTDFTLTISSLQPEDFATYYCEAYDASSGDLVFGGGTKVEIK

SEQ ID NO: 1835 - protein, 109 aa, Artificial Sequence
  Description of Artificial Sequence: Synthetic polypeptide
DIQMTQSPSSLSASVGDRVTITCRASQAVSRYLNWYQQKPGKAPKLLIYAASSLQSGVPSRFAGSGSGTDFTLTISSLQPEDFATYYCEAWDASLNHVVFGGGTKVEIK

SEQ ID NO: 1836 - protein, 109 aa, Artificial Sequence
  Description of Artificial Sequence: Synthetic polypeptide
DIQMTQSPSSLSASVGDRVTITCRASQAVSKYLNWYQQKPGKAPKLLIYAASSLQSGVPSRFSGSGSGTDFTLTISSLQPEDFATYYCQSYDNSGNVDVFGGGTKVEIK

SEQ ID NO: 1837 - protein, 108 aa, Artificial Sequence
  Description of Artificial Sequence: Synthetic polypeptide
DIQMTQSPSSLSASVGDRVTITCRASQDVSRYLDWYQQKPGKAPKLLIYAASSLQSGVPSRFSGSGSGTDFTLTISSLQPEDFATYYCQLWDGSTPFAFGGGTKVEIK

SEQ ID NO: 1838 - protein, 109 aa, Artificial Sequence
  Description of Artificial Sequence: Synthetic polypeptide
DIRMTQSPSSLSASVGDRVTITCRASQDVSSYLHWYQQKPGKAPKLLIYAASSLQSGVPSRFSGSGSGTDFTLTISSLQPEDFATYYCAAWDYSSGGWVFGGGTKVEIK

SEQ ID NO: 1839 - protein, 107 aa, Artificial Sequence
  Description of Artificial Sequence: Synthetic polypeptide
NIQMTQSPSSLSASVGDRVTITCRASQSVSTYLNWYQQKPGKAPKLLIYAASSLQSGVPSRFSGSGSGTDFTLTISSLQPEDFATYYCQQYGSPTVMFGGGTKVEIK

SEQ ID NO: 1840 - protein, 107 aa, Artificial Sequence
  Description of Artificial Sequence: Synthetic polypeptide
DIQMTQSPSSLSASVGDRVTITCRASQDVSRYLDWYQQKPGKAPKLLIYAASSLQSGVPSRFSGSGSGTDFTLTISSLQPEDFATYYCQQGNSMPFTFGGGTKVEIK

SEQ ID NO: 1841 - protein, 107 aa, Artificial Sequence
  Description of Artificial Sequence: Synthetic polypeptide
IQMTQSPSSLSASVGDRVTITCRASQAVSNYLDWYQQKPGKAPKLLIYAASSLQSGVPSRFSGSGSGTDFTLTISSLQPEDFATYYCSPYASSNPYTFGGGTKVEIK

SEQ ID NO: 1842 - protein, 108 aa, Artificial Sequence
  Description of Artificial Sequence: Synthetic polypeptide
DIQMTQSPSSLSASVGDRVTITCRASQAVSTYLAWYQQKPGKAPKLLIYAASSLQSGVPSRFSGSGSGTDFTLTISSLQPEDFATYYCSPYDSSTSGVFGGGTKVEIK

SEQ ID NO: 1843 - protein, 109 aa, Artificial Sequence
  Description of Artificial Sequence: Synthetic polypeptide
DIQMTQSPSSLSASVGDRVTITCRASQDVSNYLAWYQQKPGKAPKLLIYAASSLQSGVPSRFSGSGSGTDFTLTISSLQPEDFATYYCQSYDSSGTLFVFGGGTKVEIK

SEQ ID NO: 1844 - protein, 108 aa, Artificial Sequence
  Description of Artificial Sequence: Synthetic polypeptide
DIQMTQSPSSLSASVGDRVTITCRASQAVSKYLNWYQQKPGKAPKLLIYAASSLQSGVPSRFSGSGSGTDFTLTISSLQPEDFATYYCSQYNSSPTWVFGGGTKVEIK

SEQ ID NO: 1845 - protein, 106 aa, Artificial Sequence
  Description of Artificial Sequence: Synthetic polypeptide
DIQMTQSPSSLSASVGDRVTITCRASQDVSKYLNWYQQKPGKAPKLLIYAASSLQSGVPSRFSGSGSGTDFTLTISSLQPEDFATYYCQQSNDFLTFGGGTKVEIK

SEQ ID NO: 1846 - protein, 108 aa, Artificial Sequence
  Description of Artificial Sequence: Synthetic polypeptide
DIQMTQSPSSLSASVGDRVTITCHASQSVSRYLNWYQQKPGKAPKLLIYAASSLQSGVPSRFSGSGSGTDFTLTISSLQPEDFATYYCSSYASSPPLVFGGGTKVEIK

SEQ ID NO: 1847 - protein, 108 aa, Artificial Sequence
  Description of Artificial Sequence: Synthetic polypeptide
DIQMTQSPSSLSASVGDRVTITCRASQSVSKYLNWYQQKPGKAPKLLIYAASSLQSGVPSRFSGSGSGTDFTLTISSLQPEDFATYYCQAYDGSSTVVFGGGTKVEIK

SEQ ID NO: 1848 - protein, 108 aa, Artificial Sequence
  Description of Artificial Sequence: Synthetic polypeptide
DIQMTQSPSSLSASVGDRVTITCRASQAVSRYLAWYQQKPGKAPKLLIYAASSLQSGVPSRFSGSGSGTDFTLTISSLQPEDFATYYCSPYASSHSGMFGGGTKVEIK

SEQ ID NO: 1849 - protein, 108 aa, Artificial Sequence
  Description of Artificial Sequence: Synthetic polypeptide
DIQMTQSPSSLSASVGDRVTITCRASQYVSKYLNWYQQKPGKAPKLLIYAASSLQSGVPSRFSGSGSGTDFTLTISSLQPEDFATYYCQLYDGSSTLVFGGGTKVEIK

SEQ ID NO: 1850 - protein, 106 aa, Artificial Sequence
  Description of Artificial Sequence: Synthetic polypeptide
DIQMTQSPSSLSASVGDRVTITCRASQAVSKYLHWYQQKPGKAPKLLIYAASSLQSGVPSRFSGSGSGTDFTLTISSLQPEDFATYYCQQSYGSWTFGGGTKVEIK

SEQ ID NO: 1851 - protein, 109 aa, Artificial Sequence
  Description of Artificial Sequence: Synthetic polypeptide
DIQMTQSPSSLSASVGDRVTITCRASQHVSSYLAWYQQKPGKAPKLLIYAASSLQSGVPSRFSGSGSGTDFTLTISSLQPEDFATYYCQSWDSSLALDVFGGGTKVEIK

SEQ ID NO: 1852 - protein, 109 aa, Artificial Sequence
  Description of Artificial Sequence: Synthetic polypeptide
DIQMTQSPSSLSASVGDRVTITCRASQDISRYLAWYQQKPGKAPKLLIYAASSLQSGVPSRFSGSGSGTDFTLTISSLQPEDFATYYCQSYDSSLNSFVFGGGTKVEIK

SEQ ID NO: 1853 - protein, 108 aa, Artificial Sequence
  Description of Artificial Sequence: Synthetic polypeptide
DIQMTQSPSSLSASVGDRVTITCRASQDISTYLDWYQQKPGKAPKLLIYAASSLQSGVPSRFSGSGSGTDFTLTISSLQPEDFATYYCSQYDSSHSGVFGGGTKVEIK

SEQ ID NO: 1854 - protein, 109 aa, Artificial Sequence
  Description of Artificial Sequence: Synthetic polypeptide
DIQMSQSPSSLSASVGDRVTITCRASQAVSNYLAWYQQKPGKAPKLLIYAASSLQSGVPSRFSGSGSGTDFTLTISSLQPEDFATYYCESWDASLGDYVFGGGTKVEIK

SEQ ID NO: 1855 - protein, 109 aa, Artificial Sequence
  Description of Artificial Sequence: Synthetic polypeptide
DIQMTQSPSSLSASVGDRVTITCRASQAVSSYLDWYQQKPGKAPKLLIYAASSLQSGVPSRFSGSGSGTDFTLTISSLQPEDFATYYCASYDDSLSAWVFGGGTKVEIK

SEQ ID NO: 1856 - protein, 109 aa, Artificial Sequence
  Description of Artificial Sequence: Synthetic polypeptide
DIQMTQSPSSLSASVGDRVTITCRASQAVSRYLHWYQQKPGKAPKLLIYAASSLQSGVPSRFSGSGSGTDFTLTISSLQPEDFATYYCQSWDASSNHLVFGGGTKVEIK

SEQ ID NO: 1857 - protein, 108 aa, Artificial Sequence
  Description of Artificial Sequence: Synthetic polypeptide
TIQMTQSPSSLSASVGDRVTITCRASQDVSSYLTWYQQKPGKAPKLLIYAASSLQSGVPSRFSGSGSGTDFALTISSLQPEDFATYYCQVWDSSPTGVFGGGTKVEIK

SEQ ID NO: 1858 - protein, 109 aa, Artificial Sequence
  Description of Artificial Sequence: Synthetic polypeptide
DIQITQSPSSLSASVGDRVTITCHASQAVSKYLNWYQQKPGKAPKLLIYAASSLQSGVPSRFSGSGSGTDFTLTISSLQPEDFATYYCEAWDDSSSGGVFGGGTKVEIK

SEQ ID NO: 1859 - protein, 108 aa, Artificial Sequence
  Description of Artificial Sequence: Synthetic polypeptide
DIQMTQSPSSLSASVGDRVTITCRASQHVSSYLNWYQQKPGKAPKLLIYTASSLQSGVPSRFSGSGSGTDFTLTISSLQPEDFATYYCQVWDSSPPLAFGGGTKVEIK

SEQ ID NO: 1860 - protein, 108 aa, Artificial Sequence
  Description of Artificial Sequence: Synthetic polypeptide
DIQMTQSPSSLSASVGDRVTITCRASQAVSTYLAWYQQKPGKAPKLLIYAASSLQSGVPSRFSGSGSGTDFTLTISSLQPEDFATYYCQPYDGSPPVVFGGGTKVEIK

SEQ ID NO: 1861 - protein, 109 aa, Artificial Sequence
  Description of Artificial Sequence: Synthetic polypeptide
DIQMTQSPSSLSASVGDRVTITCRASQDVSNYLDWYQQKPGKAPKLLIYAASSLQSGVPSRFSGSGSGTDFTLTISSLQPEDFATYYCQSYDSSPNSYVFGGGTKVEIK

SEQ ID NO: 1862 - protein, 109 aa, Artificial Sequence
  Description of Artificial Sequence: Synthetic polypeptide
DIQMTQSPSSLSASVGDRVTITCRASQDVSKYLHWYQQKPGKAPKLLIYAASSLQSGVPSRFSGSGSGTDFTLTISSLQPEDFATYYCEAWDDSSNRGVFGGGTKVEIK

SEQ ID NO: 1863 - protein, 108 aa, Artificial Sequence
  Description of Artificial Sequence: Synthetic polypeptide
DIQMTQSPSSLSASVGDRVTITCRASQAVSRYLAWYQQKPGKAPKLLIYAASSLQSGVPSRFSGSGSGTDFTLTISSLQPEDFATYYCQSWDGSSPLVFGGGTKVEIK

SEQ ID NO: 1864 - protein, 108 aa, Artificial Sequence
  Description of Artificial Sequence: Synthetic polypeptide
DIQMTQSPSSLSASVGDRVTITCRASQDVSSYLAWYQQKPGKAPKLLIYAASSLQSGVPSRFSGSGSGTDFTLTISSLQPEDFATYYCSPYASSTSYAFGGGTKVEIK

SEQ ID NO: 1865 - protein, 108 aa, Artificial Sequence
  Description of Artificial Sequence: Synthetic polypeptide
DIQMTQSPSSLSASVGDRVTITCRASQAVSTYLAWYQQKPGKAPKLLIYAASSLQSGVPSRFSGSGSGTDFTLTISSLQPEDFATYYCSQYDSSPSLVFGGGTKVEIK

SEQ ID NO: 1866 - protein, 109 aa, Artificial Sequence
  Description of Artificial Sequence: Synthetic polypeptide
DIQMTQSPSSLSASVGDRVTITCRASQDISTYLNWYQQKPGKAPKLLIYAASSLQSGVPSRFSGSGSGTDFTLTISSLQPEDFATYYCQSYDNSVAGDVFGGGTKVEIK

SEQ ID NO: 1867 - protein, 108 aa, Artificial Sequence
  Description of Artificial Sequence: Synthetic polypeptide
DIQMTQSPSSLSASVGDRVTITCRASQDISSYLAWYQQKPGKAPKLLIYASSSLQSGVPSRFSGSGSGTDFTLTISSLQPEDFATYYCSPYTSSPPFVFGGGTKVEIK

SEQ ID NO: 1868 - protein, 109 aa, Artificial Sequence
  Description of Artificial Sequence: Synthetic polypeptide
DIQMTQSPSSLSASVGDRVTITCRASQDISRYLAWYQQKPGKAPKLLIYAASSLQSGVPSRFSGSGSGTDFTLTISSLQPEDFATYYCQSYDNSVSVDVFGGGTKVEIK

SEQ ID NO: 1869 - protein, 109 aa, Artificial Sequence
  Description of Artificial Sequence: Synthetic polypeptide
DIQMTQSPSSLSASVGDRVTITCRASQDISTYLAWYQQKPGKAPKLLIYAASSLQSGVPSRFSGSGSGTDFTLTISSLQPEDFATYYCASWDDSLSHGVFGGGTKVEIK

SEQ ID NO: 1870 - protein, 109 aa, Artificial Sequence
  Description of Artificial Sequence: Synthetic polypeptide
DIQMTQSPSSLSASVGDRVTITCRASQAVSSYLAWYQQKPGKAPKLLIYAASSLQSGVPSRFSGSGSGTDFTLTISSLQPEDFATYYCESYDASSDNYVFGGGTKVEIK

SEQ ID NO: 1871 - protein, 108 aa, Artificial Sequence
  Description of Artificial Sequence: Synthetic polypeptide
DIQMTQSPSSLSASVGDRVTITCRASQDVSSYLHWYQQKPGKAPKLLIYAASSLQSGVPSRFSGSGSGTDFTLTISSLQPEDFATYYCQSWDGSPTFVFGGGTKVEIK

SEQ ID NO: 1872 - protein, 109 aa, Artificial Sequence
  Description of Artificial Sequence: Synthetic polypeptide
DIQMTQSPSSLSASVGDRVTITCRASQAVSKYLNWYQQKPGKAPKLLIYAASSLQSGVPSRFSGSGSGTDFTLTISSLQPEDFATYYCQSYDNSPTAYVFGGGTKVEIK

SEQ ID NO: 1873 - protein, 119 aa, Artificial Sequence
  Description of Artificial Sequence: Synthetic polypeptide
EVQLLESGGGLVQPGGSLRLSCKASGYTFSSYYINWVRQAPGKGLEWIGWIDPNNGGTKYNEKFKGKATISRDNSKNTLYLQMNSLRAEDTAVYYCARDGRLYYDMDFWGQGTLVTVSS

SEQ ID NO: 1874 - protein, 118 aa, Artificial Sequence
  Description of Artificial Sequence: Synthetic polypeptide
EVQLLESGGGLVQPGGSLRLSCKASGFTFSSYWMHWVRQAPGKGLEWIGAIYHSGSTYYNPSLKSRVTISRDNSKNTLYLQMNSLRAEDTAVYYCAREYYYYYALDYWGQGTLVTVSS

SEQ ID NO: 1875 - protein, 113 aa, Artificial Sequence
  Description of Artificial Sequence: Synthetic polypeptide
EVQLLESGGGLVQPGGSLRLSCKASGYTFSSYWMPWVRQAPGKGLEWIGVINYSGSTYYNPSLKSRVTISRDNSKNTLYLQMNSLRAEDTAVYYCARNHGDYWGQGTLVTVSS

SEQ ID NO: 1876 - protein, 116 aa, Artificial Sequence
  Description of Artificial Sequence: Synthetic polypeptide
EVQLLESGGGLVQPGGSLRLSCKASGFTFTSYWMNWVRQAPGKGLEWVGRISPSGGSTYYADSVKGRFTISRDNSKNTLYLQMNSLRAEDTAVYYCARYYYYLDVWGQGTLVTVSS

SEQ ID NO: 1877 - protein, 118 aa, Artificial Sequence
  Description of Artificial Sequence: Synthetic polypeptide
EVQLLESGGGLVQPGGSLRLSCKASGYTFSYYSMNWVRQAPGKGLEWIGFITNSGSTYYNPSLKSRVTISRDNSKNTLYLQMNSLRAEDTAVYYCARGYYGSYGLDYWGQGTLVTVSS

SEQ ID NO: 1878 - protein, 121 aa, Artificial Sequence
  Description of Artificial Sequence: Synthetic polypeptide
EVQLLESGGGLVQPGGSLRLSCKASGFTFTSYSMPWVRQAPGKGLEWIGSISHSGSTNYNPSLKSRVTISRDNSKNTLYLQMNSLRAEDTAVYYCARDGYGGYGYGDLDDWGQGTLVTVSS

SEQ ID NO: 1879 - protein, 115 aa, Artificial Sequence
  Description of Artificial Sequence: Synthetic polypeptide
EVQLLESGGGLVQPGGSLRLSCKASGFTFSSYSMHWVRQAPGKGLEWIGVIYHSGSTNYNPSLKSRVTISRDNSKNTLYLQMNSLRAEDTAVYYCARGGYAIDYWGQGTLVTVSS

SEQ ID NO: 1880 - protein, 118 aa, Artificial Sequence
  Description of Artificial Sequence: Synthetic polypeptide
EVQLLESGGGLVQPGGSLRLSCKASGFTFSAYSMHWVRQAPGKGLEWIGRINPSNGGTNYNQKFKGKATISRDNSKNTLYLQMNSLRAEDTAVYYCARYGGYYSLDYWGQGTLVTVSS

SEQ ID NO: 1881 - protein, 119 aa, Artificial Sequence
  Description of Artificial Sequence: Synthetic polypeptide
EVQLLESGGGLVQPGGSLRLSCKASGYTFTGYSMHWVRQAPGKGLEWIGDITYSGSTNYNPSLKSRVTISRDNSKNTLYLQMNSLRAEDTAVYYCARDGSYYYYDFDVWGQGTLVTVSS

SEQ ID NO: 1882 - protein, 117 aa, Artificial Sequence
  Description of Artificial Sequence: Synthetic polypeptide
EVQLLESGGGLVQPGGSLRLSCKASGFTFSYYAMHWVRQAPGKGLEWVGRINPGGGGTYYADSVKGRFTISRDNSKNTLYLQMNSLRAEDTAVYYCARSRYYALDYWDQGTLVTVSS

SEQ ID NO: 1883 - protein, 121 aa, Artificial Sequence
  Description of Artificial Sequence: Synthetic polypeptide
EVQLLESGGGLVQPGGSLRLSCKASGYTFSSYYMSWVRQAPGKGLEWIGDITHSGSTYYNPSLKSRVTISRDNSKNTLYLQMNSLRAEDTAVYYCARSRFYSFYYYGMDVWGQGTLVTVSS

SEQ ID NO: 1884 - protein, 118 aa, Artificial Sequence
  Description of Artificial Sequence: Synthetic polypeptide
EVQLLESGGGLVQPGGSLRLSCKASGYTFSYYWMHWVRQAPGKGLEWIGVINYSGSTYYNPSLKSRVTISRDNSKNTLYLQMNSLRAEDTAVYYCARYYGYGYGMDDWGQGTLVTVSS

SEQ ID NO: 1885 - protein, 119 aa, Artificial Sequence
  Description of Artificial Sequence: Synthetic polypeptide
EVQLLESGGGLVPPGGSLRLSCKASGFTFTSYWMHWVRQAPGKGLEWVGRIRSKADGGTTEYADSVKGRFTISRDNSKNTLYLQMNSLRAEDTAVYYCARVRYGVFDYWGQGTLVTVSS

SEQ ID NO: 1886 - protein, 118 aa, Artificial Sequence
  Description of Artificial Sequence: Synthetic polypeptide
EVQLLESGGGLVQPGGSLRLSCKASGYTFSSYAMHWVRQAPGKGLEWVGRINPSGGGTYYAASVKGRFTISRDNSKNTLYLQMNSLRAEDTAVYYCARGYGGYGLDYWGQGTLVTVSS

SEQ ID NO: 1887 - protein, 119 aa, Artificial Sequence
  Description of Artificial Sequence: Synthetic polypeptide
EVQLLESGGGLVQPGGSLRLSCKASGFTFTSYAMYWVRQAPGKGLEWIGDISYSGSTYYNPSLKSRVTISRDNSKNTLYLQMNSLRAEDTAVYYCARDGYGYSYAMDVWGQGTLVTVSS

SEQ ID NO: 1888 - protein, 122 aa, Artificial Sequence
  Description of Artificial Sequence: Synthetic polypeptide
EVQLLESGGGLVQPGGSLRLSCKASGYTFTNYSIHWVRQAPGKGLEWVGRISPGGGGTYYAASVKGRFTISRDNSKNTLYLQMNSLRAEDTAVYYCARGGGYSGYYYAMDYWGQGTLVTVSS

SEQ ID NO: 1889 - protein, 120 aa, Artificial Sequence
  Description of Artificial Sequence: Synthetic polypeptide
EVQLLESGGGLVQPGGSLRLSCKASGYTFSYYYMHWVRQAPGKGLEWIGYIYYSGSTNYNPDLKRRRTIISRDNSKNTLYLQMNSLRAEDTAVYYCARGRYGSYYGFDVWGQGTLVTVSS

SEQ ID NO: 1890 - protein, 121 aa, Artificial Sequence
  Description of Artificial Sequence: Synthetic polypeptide
EVQLLESGGGLVQPGGSLRLSCKASGFTFSSYYMHWVRQAPGKGLEWVGRIRSKADGGTTDYAASVKGRFTISRDNSKNTLYLQMNSLRAEDTAVYYCARDGYGSYGMDVWGQGTLVTVSS

SEQ ID NO: 1891 - protein, 115 aa, Artificial Sequence
  Description of Artificial Sequence: Synthetic polypeptide
EVQLLESGGGLVQPGGSLRLSCKASGFTFSSYSMYWVRQAPGKGLEWIGAISYSGSTNYNPSLKSRVTISRDNSKNTLYLQMNSLRAEDTAVYYCARRYGGFAVWGQGTLVTVSS

SEQ ID NO: 1892 - protein, 120 aa, Artificial Sequence
  Description of Artificial Sequence: Synthetic polypeptide
EVQLLESGGGLVQPGGSLRLSCKASGFTFTYYYMSWVRQAPGKGLEWVGRINPGGGDTYYADSVKGRFTISRDNSKNTLYLQMNSLRAEDTAVYYCARDGGGGYYGMDYWGQGTLVTVSS

SEQ ID NO: 1893 - protein, 118 aa, Artificial Sequence
  Description of Artificial Sequence: Synthetic polypeptide
EVQLLESGGGLVQPGGSLRLSCKASGFTFSSYYMNWVRQAPGKGLEWIGVISYSGSTYYNPSLKSRVTISRDNSKNTLYLQMNSLRAEDTAVYYCAREGPYYGAMDYWGQGTLVTVSS

SEQ ID NO: 1894 - protein, 116 aa, Artificial Sequence
  Description of Artificial Sequence: Synthetic polypeptide
QVQLLESGGGLVQPGGSLRLSCKASGFTFTSYWMYWVRQAPGKGLEWIGRINPSSGGTKYTEKFKGRATISRDNSKNTLYLQMNSLRAEDTAVYYCARYYYGLDVWGQSTLVTVSS

SEQ ID NO: 1895 - protein, 117 aa, Artificial Sequence
  Description of Artificial Sequence: Synthetic polypeptide
EVQLLESGGGLVQPGGSLRLSCKASGFTFTYYWMSWVRQAPGKGLEWIGWINPGSGGTKYDEKFKGRATISRDNSKNTLYLQMNSLRAEDTAVYYCARSSYYGMDYWGQGTLVTVSS

SEQ ID NO: 1896 - protein, 118 aa, Artificial Sequence
  Description of Artificial Sequence: Synthetic polypeptide
EVQLLESGGGLVQPGGSLRLSCKASGFTFTAYSMSWVRQAPGKGLEWIGYITYSGSTSYNPDLKRRRFTISRDNSKNTLYLQMNSLRAEDTAVYYCARDGGYYGMDVWGQGTLVTVSS

SEQ ID NO: 1897 - protein, 124 aa, Artificial Sequence
  Description of Artificial Sequence: Synthetic polypeptide
EVQLLESGGGLVQPGGSLRLSCKASGFTFSYYGMSWVRQAPGKGLEWVGRIRSKANGGTTDYAASVKGRFTISRDNSKNTLYLQMNSLRAEDTAVYYCARDIYIYGYYYGMDVWGQGTLVTVSS

SEQ ID NO: 1898 - protein, 108 aa, Artificial Sequence
  Description of Artificial Sequence: Synthetic polypeptide
DIQITQSPSSLSASVGDRVTITCRASQSISTYLNWYQQKPGKAPKLLIYAASSLQSGVPSRFSGSGSGTDFTLTISSLQPEDFATYYCSQYDSSHPGMFGGGTKVEIK

SEQ ID NO: 1899 - protein, 107 aa, Artificial Sequence
  Description of Artificial Sequence: Synthetic polypeptide
DIQMTQSPSSLSASVGDRVTITCRASQAISNYLDWYQQKPGKAPKLLIYAASSLQSGVPSRFSGSGSGTDFTLTISSLQPEDFATYYCQQSNSSPFTFGGGTKVEIK

SEQ ID NO: 1900 - protein, 109 aa, Artificial Sequence
  Description of Artificial Sequence: Synthetic polypeptide
NIQMTQSPSSLSASVGDRVTITCRASQDVSKYLTWYQQKPGKAPKLLIYAASSLQSGVPSRFSGSGSGTDFTLTISSLQPEDFATYYCESYDDSLGGGVFGGGTKVEIK

SEQ ID NO: 1901 - protein, 109 aa, Artificial Sequence
  Description of Artificial Sequence: Synthetic polypeptide
DIQMTQSPSSLSASVGDRVTITCRASQAVSSYLDWYQQKPGKAPKLLIYAASSLQSGVPSRFSGSGSGTDFTLTISSLQPEDFSTYYCEAWDASSSGGVFGGGTKVEIK

SEQ ID NO: 1902 - protein, 109 aa, Artificial Sequence
  Description of Artificial Sequence: Synthetic polypeptide
DIQMTQSPSSLSASVGDRVTITCRASQAVSTYLNWYQQKPGKAPKLLIYAASSLQSGVPSRFSGSGSGTDFTLTISSLQPEDFATYYCESYDNSLDNVVFGGGTKVEIK

SEQ ID NO: 1903 - protein, 109 aa, Artificial Sequence
  Description of Artificial Sequence: Synthetic polypeptide
DIQMTQSPSSLSASVGDRVTITCRTSQYVSRYLNWYQQKPGKAPKLLIYAASSLQSGVPSRFSGSGSGTDFTLTISSLQPEDFATYYCESWDSSLDPVVFGGGTKVEIK

SEQ ID NO: 1904 - protein, 106 aa, Artificial Sequence
  Description of Artificial Sequence: Synthetic polypeptide
DIQMTQSPSSLSASVGDRVTITCRASQAISRYLAWYQQKPGKAPKLLIYAASSLQSGVPSRFSGSGSGTDFTLTISSLQPEDFATYYCQQSRSHLTFGGGTKVEIK

SEQ ID NO: 1905 - protein, 109 aa, Artificial Sequence
  Description of Artificial Sequence: Synthetic polypeptide
DIQMTQSPSSLSASVGDRVTITCRASQAVSKYLNWYQQKPGKAPKLLIYAASSLQSGVPSRFSGSGSGTDFTLTISSLQPEDFATYYCQSYDNSGNGDVFGGGTKVEIK

SEQ ID NO: 1906 - protein, 109 aa, Artificial Sequence
  Description of Artificial Sequence: Synthetic polypeptide
DIQMTQSPSSLSASVGDRVTITCRASQAVSKYLAWYQQKPGKAPKLLIYAASSLQSGVPSRFSGSGSGTDFTLTISSLQPEDFATYYCEAYDDSLGHLVFGGGTKVEIK

SEQ ID NO: 1907 - protein, 108 aa, Artificial Sequence
  Description of Artificial Sequence: Synthetic polypeptide
DIQMTQSPSSLSASVGDRVTITCRASQAISSYLAWYQQKPGKAPKLLIYAASSLQSGVPSRFSGSGSGTDFTLTISSLQPEDFATYYCSQYDSSHPGVFGGGTKVEIK

SEQ ID NO: 1908 - protein, 108 aa, Artificial Sequence
  Description of Artificial Sequence: Synthetic polypeptide
DIQMTQSPSSLSASVGDRVTITCRASQDVSKYLAWYQQKPGKAPKLLIYAASSLQSGVPSRFSGSGSGTDFTLTISSLQPEDFATYYCSQYASSTSFMFGGGTKVEIK

SEQ ID NO: 1909 - protein, 108 aa, Artificial Sequence
  Description of Artificial Sequence: Synthetic polypeptide
DIQMTQSPSSLSASVGDRVTITCRASQAVSRYLDWYQQKPGKAPKLLIYAASSLQSGVPSRFSGSGSGTDFTLTISSLQPEDFATYYCSSYNSSNSGAFGGGTKVEIK

SEQ ID NO: 1910 - protein, 108 aa, Artificial Sequence
  Description of Artificial Sequence: Synthetic polypeptide
DIQMTQSPSSLSASVGDRVTITCRASQDVSRYLAWYQQKPGKAPKLLIYAASSLQSGVPSRFSGSGSGTDFTLTISSLQPEDFATYYCSSYDSSHSLAFGGGTKVEIK

SEQ ID NO: 1911 - protein, 108 aa, Artificial Sequence
  Description of Artificial Sequence: Synthetic polypeptide
DIQMTQSPSSLSASVGDRVTITCRASQAVSSYLPWYQQKPGKAPKLLIYAASSLQSGVPSRFSGSGSGTDFTLTISSLQPEDFATYYCSPYASSHTFAFGGGTKVEIK

SEQ ID NO: 1912 - protein, 108 aa, Artificial Sequence
  Description of Artificial Sequence: Synthetic polypeptide
DIQMTQSPSSLSASVGDRVTITCRASQSVSNYLDWYQQKPGKAPKLLIYAASSLQSGVPSRFSGSGSGTDFTLTISSLQPEDFATYYCQPYASSPSFVFGGGTKVEIK

SEQ ID NO: 1913 - protein, 109 aa, Artificial Sequence
  Description of Artificial Sequence: Synthetic polypeptide
DIQMTQSPSSLSASVGDRVTITCRASQDVSTYLDWYQQKPGKAPKLLIYAASSLQSGVPSRFSGSGSGTDFTLTISSLQPEDFATYYCQSYDSSGYRYVFGGGTKVEIK

SEQ ID NO: 1914 - protein, 108 aa, Artificial Sequence
  Description of Artificial Sequence: Synthetic polypeptide
DIQMTQSPSSLSASVGDRVTITCRASQDISKYLHWYQQKPGKAPKLLSYAASSLQSGVPSRFSGSGSGTDFTLTISSLQPEDFATYYCEAYDSSHPLMFGGGTKVEIK

SEQ ID NO: 1915 - protein, 108 aa, Artificial Sequence
  Description of Artificial Sequence: Synthetic polypeptide
DIQMTQSPSSLSASVGDRVTITCRASQAISRYLAWYQQKPGKAPKLLIYAASSLQSGVPSRFSGSGSGTDFTLTISSLQPEDFATYYCQPYDGSPPVAFGGGTKVEIK

SEQ ID NO: 1916 - protein, 108 aa, Artificial Sequence
  Description of Artificial Sequence: Synthetic polypeptide
DIQMTQSPSSLSASVGDRVTITCRASQAVSRYLNWYQQKPGKAPKLLIYAASSLQSGVPSRFSGSGSGTDFTLTISSLQPEDFATYYCSPYDSSPPGVFGGGTKVEIK

SEQ ID NO: 1917 - protein, 109 aa, Artificial Sequence
  Description of Artificial Sequence: Synthetic polypeptide
DIQMTQSPSSLSASVGDRVTITCRASQAVSSYLDWYQQKPGKAPKLLIYAASSLQSGVPSRFSGSGSGTDFTLTISSLQPEDFATYYCQSWDNSATHYVFGGGTKVEIK

SEQ ID NO: 1918 - protein, 108 aa, Artificial Sequence
  Description of Artificial Sequence: Synthetic polypeptide
DIQMTQSPSSLSASVGDRVTITCRASQDVSSYLAWYQQKPGKAPKLLIYAASSLQSGVPSRFSGSGSGTDFTLTISSLQPEDFATYYCQVYDGSSTGMLGGGTKVEIK

SEQ ID NO: 1919 - protein, 106 aa, Artificial Sequence
  Description of Artificial Sequence: Synthetic polypeptide
IQMTQSPSSLSASVGDRVTITCRASQSISRYLHWYQQKPGKAPKLLIYAASSLQSGVPSRFSGSGSGTDFTLTISSLQPEDFATYYCQSYASPTYVFGGGTKVEIK

SEQ ID NO: 1920 - protein, 109 aa, Artificial Sequence
  Description of Artificial Sequence: Synthetic polypeptide
DIQMTQSPSSLSASVGDRVTITCRASQDVSKYLAWYQQKPGKAPKLLIYAASSLQSGVPSRFSGSGSGTDFTLTISSLQPEDFATYYCQSWDNSSYNFVFGGGTKVEIK

SEQ ID NO: 1921 - protein, 107 aa, Artificial Sequence
  Description of Artificial Sequence: Synthetic polypeptide
DIQMTQSPSSLSASVGDRVTITCRASQDISSYLNWYQQKPGKAPKLLIYAASSLQSGVPSRFSGSGSGTDFTLTISSLQPEDFATYYCQQWYSSPVVFGGGTKVEIK

SEQ ID NO: 1922 - protein, 108 aa, Artificial Sequence
  Description of Artificial Sequence: Synthetic polypeptide
DIQMTQSPSSLSASVGDRVTITCRASQSISRYLTWYQQKPGKAPKLLIYAASSLQSGVPSRFSGSGSGTDFTLTISSLQPEDFATYYCQPYDGSSPVAFGGGTKVEIK

SEQ ID NO: 1923 - protein, 118 aa, Artificial Sequence
  Description of Artificial Sequence: Synthetic polypeptide
EVQLLESGGGLVQPGGSLRLSCKASGFTFSSYALSWVRQAPGKGLEWIGEIYHSGSTYYNPSLKSRVTISRDNSKNTLYLQMNSLRAEDTAVYYCARYSYGGYDFDYWGQGTLVTVSS

SEQ ID NO: 1924 - protein, 116 aa, Artificial Sequence
  Description of Artificial Sequence: Synthetic polypeptide
EVQLLESGGGLVQPGGSLRLSCKASGFTFSSYWMSWVRQAPGKGLEWIGDISYSGSTYYNPSLKSRVTISRDNSKNTLYLQMNSLRAEDTAVYYCARGGGYDLAYWGQGTLVTVSS

SEQ ID NO: 1925 - protein, 117 aa, Artificial Sequence
  Description of Artificial Sequence: Synthetic polypeptide
EVQLLESGGGLVQPGGSLRLSCKASGYTFTSYSMNWVRQAPGKGLEWIGDIYYSGSTYYNPSLKSRVTISRDNSKNTLYLQMNSLRAEDTAVYYCARYRGYSGLDYWGQGTLVTVSS

SEQ ID NO: 1926 - protein, 117 aa, Artificial Sequence
  Description of Artificial Sequence: Synthetic polypeptide
EVQLLESGGGLVQPGGSLRLSCKASGFTFTYYAMPWVRQAPGKGLEWIGDIYYSGSTYYNPSLKSRVTISRDNSKNTLYLQMNSLRAEDTAVYYCARYYGGGALDVWGQGTLVTVSS

SEQ ID NO: 1927 - protein, 118 aa, Artificial Sequence
  Description of Artificial Sequence: Synthetic polypeptide
EVQLLESGGGLVQPGGSLRLSCKASGFTFSYYSMSWVRQAPGKGLEWIGAIYHSGSTYYNPSLKSRVTISRDNSKNTLYLQMNSLRAEDTAVYYCARYRYYSGGFDYWGQGTLVTVSS

SEQ ID NO: 1928 - protein, 118 aa, Artificial Sequence
  Description of Artificial Sequence: Synthetic polypeptide
EVQLLESGGGLVQPGGSLRLSCKASGYTFTYYAMSWVRQAPGKGLEWIGDIYHSGSTYYNPSLKSRVTISRDNSKNTLYLQMNSLRAEDTAVYYCARYRYYYWGFDVWGQGTLVTVSS

SEQ ID NO: 1929 - protein, 120 aa, Artificial Sequence
  Description of Artificial Sequence: Synthetic polypeptide
EVQLLESGSGLVQPGGSLRLSCKASGYTFSDYAMSWVRQAPGKGLEWIGDIYHSGSTYYNPSLKSRVTISRDNSKNTLYLQMNSLRAEDTAVYYCARFGYYYNDYAMDYWGQGTLVTVSS

SEQ ID NO: 1930 - protein, 117 aa, Artificial Sequence
  Description of Artificial Sequence: Synthetic polypeptide
EVQLLESGGGLVQPGGSLRLSCKASGFTFSSYAMSWVRQAPGKGLEWIGEIYHSGSTYYNPSLKSRVTISRDNSKNTLYLQMNSLRAEDTAVYYCARYYYYYYLDYWGQGTLVTVSS

SEQ ID NO: 1931 - protein, 121 aa, Artificial Sequence
  Description of Artificial Sequence: Synthetic polypeptide
EVQLLESGGGLVQPGGSLRLSCKASGYTFSDYGMYWVRQAPGKGLEWIGEIYHSGSTYYNPSLKSRVTISRDNSKNTLYLQMNSLRAEDTAVYYCARNGYYGGYYYAMDYWGQGTLVTVSS

SEQ ID NO: 1932 - protein, 118 aa, Artificial Sequence
  Description of Artificial Sequence: Synthetic polypeptide
EVQLLESGGGLVQPGGSLRLSCKASGYTFTAYYMSWVRQAPGKGLEWIGDIYYSGSTYYNPSLKSRVTISRDNSKNTLYLQMNSLRAEDTAVYYCARGSPSYYGMDYWGQGTLVTVSS

SEQ ID NO: 1933 - protein, 119 aa, Artificial Sequence
  Description of Artificial Sequence: Synthetic polypeptide
EVQLLESGGGLVQPGGSLRLSCKASGYTFSSYSMSWVRQAPGKGLEWIGDIYHSGSTYYNPSLKSRVTISRDNSKNTLYLQMNSLRAEDTAVYYCARYYGGYGYGFDDWGQGTLVTVSS

SEQ ID NO: 1934 - protein, 116 aa, Artificial Sequence
  Description of Artificial Sequence: Synthetic polypeptide
EVQLLESGGGLVQPGGSLRLSCKASGFTFSSYAMSWVRQAPGKGLEWIGDIYHSGSTYYNPSLKSRVTISRDNSKNTLYLQMNSLRAEDTAVYYCARYGYNHFAYWGQGTLVTVSS

SEQ ID NO: 1935 - protein, 117 aa, Artificial Sequence
  Description of Artificial Sequence: Synthetic polypeptide
EVQLVESGGGLVQPGGSLRLSCKASGYTFTYYSMSWVRQAPGKGLEWIGDIYHSGSTYYNPSLKSRVTISRDNSKNTLYLQMNSLRAEDTAVYYCARYGYGGDFDVWGQGTLVTVSS

SEQ ID NO: 1936 - protein, 106 aa, Artificial Sequence
  Description of Artificial Sequence: Synthetic polypeptide
DIQMTQSPSSLSASVGDRVTITCRASQSVSRYLHWYQQKPGKAPKLLIYAASSLQSGVPSRFSGSGSGTDFTLTISSLQPEDFATYYCQQSARSPTFGGGTKVEIK

SEQ ID NO: 1937 - protein, 109 aa, Artificial Sequence
  Description of Artificial Sequence: Synthetic polypeptide
DIQMTQSPSSLSASVGDRVTITCRASQYVSRYLNWYQQKPGKAPKLLIYAASSLQSGVPSRFSGSGSGTDFTLTISSLQPEDFATYYCQSYDNSVPNFVFGGGTKVEIK

SEQ ID NO: 1938 - protein, 106 aa, Artificial Sequence
  Description of Artificial Sequence: Synthetic polypeptide
DIQMTQSPSSLSASVGDRVTITCRASQDVSRYLTWYQQKPGKAPKLLIYAASSLQSGVPSRFSGSGSGTDFTLTISSLQPEDFATYYCQQSASLPTFGGGTKVEIK

SEQ ID NO: 1939 - protein, 106 aa, Artificial Sequence
  Description of Artificial Sequence: Synthetic polypeptide
DIQMTQSPSSLSASVGDRVTITCRASQDVSRYLAWYQQKPGKAPKLLIYAASSLQSGVPSRFSGSGSGTDFTLTISSLQPEDFATYYCQQSADYPTFGGGTKVEIK

SEQ ID NO: 1940 - protein, 106 aa, Artificial Sequence
  Description of Artificial Sequence: Synthetic polypeptide
DIQMTQSPSSLSASVGDRVTITCRASQAVSSYLAWYQQKPGKAPKLLIYAASSLQSGVPSRFSGSGSGTDFTLTISSLQPEDFATYYCQQYGNLPTFGGGTKVEIK

SEQ ID NO: 1941 - protein, 106 aa, Artificial Sequence
  Description of Artificial Sequence: Synthetic polypeptide
DIQMTQSPSSLSASVGDRVTITCRASQSVSSYLTWYQQKPGKAPKLLIYAASSLQSGVPSRFSGSGSDTDFTLTISSLQPEDFATYYCQQSHGSPTFGGGTKVEIK

SEQ ID NO: 1942 - protein, 106 aa, Artificial Sequence
  Description of Artificial Sequence: Synthetic polypeptide
DIQMTQSPSSLSASVGDRVTITCRASQYISSYLDWYQQKPGKAPKLLIYAASSLQSGVPSRFSGSGSGTDFTLTISSLQPEDFATYYCQQSAGHPTFGGGTKVEIK

SEQ ID NO: 1943 - protein, 106 aa, Artificial Sequence
  Description of Artificial Sequence: Synthetic polypeptide
DIQMTQSPSSLSASVGDRVTITCRASQAISSYLDWYQQKPGKAPKLLIYAASSLQSGVPSRFSGSGSGTDFTLTISSLQPEDFATYYCQQYGGYPTFGGGTKVEIK

SEQ ID NO: 1944 - protein, 106 aa, Artificial Sequence
  Description of Artificial Sequence: Synthetic polypeptide
DIQMTQSPSSLSASVGDRVTITCRASQDVSSYLNWYQQKPGKAPKLLIYAASSLQSGVPSRFSGSGSGTDFTLTISSLQPEDFATYYCQQSGNLPTFGGGTKVEIK

SEQ ID NO: 1945 - protein, 106 aa, Artificial Sequence
  Description of Artificial Sequence: Synthetic polypeptide
EIVLTQSPATLSLSPGERATITCRASQSISNYLNWYQQKPGQAPRLLIYDASNRATGIPARFSGSGSGTDFTLTISSLEPEDFAVYYCQQSSGSPTFGGGTKVEIK

SEQ ID NO: 1946 - protein, 106 aa, Artificial Sequence
  Description of Artificial Sequence: Synthetic polypeptide
EIVLTQSPATLSLSPGERATITCRASQDIGNYLDWYQQKPGQAPRLLIYDASNRATGIPARFSGSGSGTDFTLTISSLEPEDFAVYYCQQWGGHPTFGGGTKVEIK

SEQ ID NO: 1947 - protein, 106 aa, Artificial Sequence
  Description of Artificial Sequence: Synthetic polypeptide
EIVLTQSPATLSLSPGERATITCRASQDVGNYLTWYQQKPGQAPRLLIYDASNRATGIPARFSGSGSGTDFTLTISSLEPEDFAVYYCQQSGGYPTFGGGTKVEIK

SEQ ID NO: 1948 - protein, 106 aa, Artificial Sequence
  Description of Artificial Sequence: Synthetic polypeptide
EIVLTQSPATLSLSPGERATITCRASQSVSTYLDWYQQKPGQAPRLLIYDASNRATGIPARFSGSGSGTDFTLTISSLEPEDFAVYYCQQWGGLPTFGGGTKVEIK

SEQ ID NO: 1949 - protein, 117 aa, Artificial Sequence
  Description of Artificial Sequence: Synthetic polypeptide
EVQLLESGGGLVQPGGSLRLSCKASGYTFSDYGMSWVRQAPGKGLEWIGVIYHSGSTYYNPSLKSRVTISRDNSKNTLYLQMNSLRAEDTAVYYCARADGSYGMDVWGQGTLVTVSS

SEQ ID NO: 1950 - protein, 123 aa, Artificial Sequence
  Description of Artificial Sequence: Synthetic polypeptide
EVQLLESGGGLVQPGGSLRLSCKASGFTFSDYYMSWVRQAPGKGLEWIGRINPGSGGTKYNEKFKSKATLTISRDNSKNTLYLQMNSLRAEDTAVYYCARDAIYYDYSPLDVWGQGTLVTVSS

SEQ ID NO: 1951 - protein, 123 aa, Artificial Sequence
  Description of Artificial Sequence: Synthetic polypeptide
EVQLLESGGGLVQPGGSLRLSCKASGYTFSSYAMHWVRQAPGKGLEWVGRISPDGGGTYYADSVKGHFTISRDNSKNTLYLQMNSPRAEDTAVYYCARDRYDRGSSYYALDVWGQGTLVTVSS

SEQ ID NO: 1952 - protein, 121 aa, Artificial Sequence
  Description of Artificial Sequence: Synthetic polypeptide
EVQLLESGGGLVQPGGSLRLSCKASGFTFSAYGMPWVRQAPGKGLEWIGSITHSGSTYYNPSLKSRVTISRDNSKNTLYLQMNSLRAEDTAVYYCARGGYYGSYYYAMDYWGQGTLVTVSS

SEQ ID NO: 1953 - protein, 124 aa, Artificial Sequence
  Description of Artificial Sequence: Synthetic polypeptide
EVQLLESGGGLVQPGGSLRLSCKASGYTFTGYGMNWVRQAPGKGLEWIGRIYPSSGGTNYNEKFKSKATLTISRDNSKNTLYLQMNSLRAEDTAVYYCARDLYNNAYYYGMDYWGQGTLVTVSS

SEQ ID NO: 1954 - protein, 116 aa, Artificial Sequence
  Description of Artificial Sequence: Synthetic polypeptide
EVQLLESGGGLVQPGGSLRLSCKASGYTFSDYATSWVRQVPGKGLEWIGRINPSSGSTNYAQKFKGRATISRDNSKNTLYLQMNSLRAEDTAVYYCARYGYYIDYWGQGTLVTVSS

SEQ ID NO: 1955 - protein, 118 aa, Artificial Sequence
  Description of Artificial Sequence: Synthetic polypeptide
EVQLLESGGGLVQPGGSLRLSCKASGYTFTGYGIHWVRQAPGKGLEWVGVISSSGSTYYADSVKGRFTISRDNSKNTLYLQMNSLRAEDTAVYYCARRSHSYGAFDYWGQGTLVTVSS

SEQ ID NO: 1956 - protein, 120 aa, Artificial Sequence
  Description of Artificial Sequence: Synthetic polypeptide
EVQLLESGGGLVQPGGSLRLSCKASGYTFSDYGMSWVRQAPGKGLEWIGRIYPDSRGTHYNQKFKSKATLTISRDNSKNTLYLQMNSLRAEDTAVYYCARGHHYYYWDFWGQGTLVTVSS

SEQ ID NO: 1957 - protein, 118 aa, Artificial Sequence
  Description of Artificial Sequence: Synthetic polypeptide
EVQLLESGGGLVQPGGSLRLSCKASGYTFTDYWMSWVRQAPGKGLEWIGEINYSGSTYYNPSLKSRVTISRDNSKNTLYLQMNSLRAEDTAVYYCARGRYGGDGMDFWGQGTLVTVSS

SEQ ID NO: 1958 - protein, 118 aa, Artificial Sequence
  Description of Artificial Sequence: Synthetic polypeptide
EVQLLESGGGLVQPGGSLRLSCKASGFTFSYYGMHWVRQAPGKGLEWVGRISPSGGSTYYADSVKGRFTISRDNSKNTLYLQMNSLRADDTAVYYCARDDSGYGMDFWGQGTLVTVSS

SEQ ID NO: 1959 - protein, 121 aa, Artificial Sequence
  Description of Artificial Sequence: Synthetic polypeptide
EVQLLESGGGLVQPGGSLRLSCKASGYTFSDYYMHWVRQAPGKGLEWVGRINPGGGSTYYADSVKGRFTISRDNSKNTLYLQMNSLRAEDTAVYYCARSRIYYYYYGMDYWGQGTLVTVSS

SEQ ID NO: 1960 - protein, 117 aa, Artificial Sequence
  Description of Artificial Sequence: Synthetic polypeptide
EVQLLESGGGLVQPGGSLRLSCKASGYTFTSYGMHWVRQAPGKGLEWIGYISYSGSTNYNPDLKSRRTIISRDNSKNTLYLQMNSLRAEDTAVYYCARGYYADMDYWGQGTLVTVSS

SEQ ID NO: 1961 - protein, 122 aa, Artificial Sequence
  Description of Artificial Sequence: Synthetic polypeptide
EVQLLESGGGLVQPGGSLRLSCKASGFTFSSYSMHWVRQAPGKGLEWIGWIDPGSGGTKYNQKFKGKATISRDNSKNTLYLQMNSLRAEDTAVYYCARDGYGGYSYGDMDDWGQGTLVTVSS

SEQ ID NO: 1962 - protein, 122 aa, Artificial Sequence
  Description of Artificial Sequence: Synthetic polypeptide
EVQLLESGGGLVQPGGSLRLSCKASGFTFTSYSMNWVRQAPGKGLEWIGAITYSGSTYYNPSLKSRVTISRDNSKNTLYLQMNSLRAEDTAVYYCAREGADRVSMVHPFDYWGQGTLVTVSS

SEQ ID NO: 1963 - protein, 119 aa, Artificial Sequence
  Description of Artificial Sequence: Synthetic polypeptide
EVQLLESGGGLVQPGGSLRLSCKASGFTFTSYYMHWVRQAPGKGLEWVGRINPNGGSTYYADSVKGRFTISRDNSKNTLYLQMNSLRAEDTAVYYCARYYYGGYGLHVWGQGTLVTVSS

SEQ ID NO: 1964 - protein, 119 aa, Artificial Sequence
  Description of Artificial Sequence: Synthetic polypeptide
EVQLLESGGGLVQPGGSLRLSCKASGFTFTSYAMNWVRQAPGKGLEWIGRINPSSGSTKYDQKFKGRFTISRDNSKNTLYLQMNSLRAEDTAVYYCARGYGSNYYMDYWGQGTLVTVSS

SEQ ID NO: 1965 - protein, 119 aa, Artificial Sequence
  Description of Artificial Sequence: Synthetic polypeptide
EVQLLESGGGLVQPGGSLRLSCKASGFTFTSYSMPWVRQAPGKGLEWIGFIYHSGSTNYNPSLKSRVTISRDNSRNTLYLQMNSLRAEDTAVYYCARDGYYGYYGLDDWGQGTLVTVSS

SEQ ID NO: 1966 - protein, 111 aa, Artificial Sequence
  Description of Artificial Sequence: Synthetic polypeptide
QSVLTQPPSVSGAPGQRVTISCTGSSSNIGAGYDVHWYQQLPGTAPKLLIYGNSNRPSGVPDRFSGSKSGTSASLAITGLQAEDEADYYCAIWDSSLGAGVFGGGTKLTVL

SEQ ID NO: 1967 - protein, 111 aa, Artificial Sequence
  Description of Artificial Sequence: Synthetic polypeptide
QSVLTQPPSVSGAPGQRVTISCTGSSSNIGAGYDVHWYQQLPGTAPKLLIYGNSNRPSGVPDRFSGSKSGTSASLAITGLQAEDEADYYCEVWDDSLSDLVFGGGTKLTVL

SEQ ID NO: 1968 - protein, 111 aa, Artificial Sequence
  Description of Artificial Sequence: Synthetic polypeptide
QSVLTQPPSVSGAPGQRVTISCTGSSSNIGAGYDVHWYQQLPGTAPKLLIYGNSNRPSGVPDRFSGSKSGTSASLAITGLQAEDEADYYCQFWDDSLNRSVFGGGTKLTVL

SEQ ID NO: 1969 - protein, 111 aa, Artificial Sequence
  Description of Artificial Sequence: Synthetic polypeptide
QSVLTQPPSVSGAPGQRVTISCTGSSSNIGAGYDVHWYQQLPGTAPKLLIYGNSNRPSGVPDRFSGSKSGTSASLAITGLQAEDEADYYCSVWDSSLGHLVFGGGTKLTVL

SEQ ID NO: 1970 - protein, 111 aa, Artificial Sequence
  Description of Artificial Sequence: Synthetic polypeptide
QSVLTQPPSVSGAPGQRVTISCTGSSSNIGAGYDVHWYQQLPGTAPKLLIYGNSNRPSGVPDRFSGSKSGTSASLAITGLQAEDEADYYCQAWDASLNAGVFGGGTKLTVL

SEQ ID NO: 1971 - protein, 111 aa, Artificial Sequence
  Description of Artificial Sequence: Synthetic polypeptide
QSVLTQPPSVSGAPGQRVTISCTGSSSNIGAGYDVHWYQQLPGTAPKLLIYGNSNRPSGVPDRFSGSKSGTSASLAITGLQAEDEADYYCEIWDDSLGGSVFGGGTKLTVL

SEQ ID NO: 1972 - protein, 111 aa, Artificial Sequence
  Description of Artificial Sequence: Synthetic polypeptide
QSVLTQPPSVSGAPGQRVTISCTGSSSNIGAGYDVHWYQQLPGTAPKLLIYGNSNRPSGVPDRFSGSKSGTSASLAITGLQAEDEADYYCSVWDYSLNHYVFGGGTKLTVL

SEQ ID NO: 1973 - protein, 111 aa, Artificial Sequence
  Description of Artificial Sequence: Synthetic polypeptide
QSVLTQPPSVSGAPGQRVTISCTGSSSNIGAGYDVHWYQQLPGTAPKLLIYGNSNRPSGVPDRFSGSKSGTSASLAITGLQAEDEADYYCQSYDSWPPGFVFGGGTKLTVL

SEQ ID NO: 1974 - protein, 111 aa, Artificial Sequence
  Description of Artificial Sequence: Synthetic polypeptide
QSVLTQPPSVSGAPGQRVTISCTGSSSNIGAGYDVHWYQQLPGTAPKLLIYGNSNRPSGVPDRFSGSKSGTSASLAITGLQAEDEADYYCEAWDSSLNAHVFGGGTKLTVL

SEQ ID NO: 1975 - protein, 109 aa, Artificial Sequence
  Description of Artificial Sequence: Synthetic polypeptide
QSVLTQPPSVSGAPGQRVTISCTGSSSNIGAGYDVHWYQQLPGTAPKLLIYGNSNRPSGVPDRFSGSKSGTSASLAITGLQAEDEADYYCQQYNNTPPTFGGGTKLTVL

SEQ ID NO: 1976 - protein, 111 aa, Artificial Sequence
  Description of Artificial Sequence: Synthetic polypeptide
QSVLTQPPSVSGAPGQRVTISCTGSSSNIGAGYDVHWYQQLPGTAPKLLIYGNSNRPSGVPDRFSGSKSGTSASLAITGLQAEDEADYYCSSYDSSLGRYVFGGGTKLTVL

SEQ ID NO: 1977 - protein, 110 aa, Artificial Sequence
  Description of Artificial Sequence: Synthetic polypeptide
QSVLTQPPSVSGAPGQRVTISCTGSSSNIGAGYDVHWYQQLPGTAPKLLIYGNSNRPSGVPDRFSGSKSGTSASLAITGLQAEDEADYYCSSYTSSPSFMFGGGTKLTVL

SEQ ID NO: 1978 - protein, 108 aa, Artificial Sequence
  Description of Artificial Sequence: Synthetic polypeptide
DIQMTQSPSSLSASVGDRVTITCRASQDVSSYLNWYQQKPGKAPKLLIYAASSLQSGVPSRFSGSGSGTDFTLTISSLQPEDFATYYCSSYDSSTPVVFGGGTKVEIK

SEQ ID NO: 1979 - protein, 108 aa, Artificial Sequence
  Description of Artificial Sequence: Synthetic polypeptide
DIQMTQSPSSLSASVGDRVTITCRASQAISRYLAWYQQKPGKAPKLLIYAASSLQSGVPSRFSGSGSGTDFTLTISSLQPEDFATYYCQPYASSNTYVFGGGTKVEIK

SEQ ID NO: 1980 - protein, 109 aa, Artificial Sequence
  Description of Artificial Sequence: Synthetic polypeptide
DIQMTQSPSSLSASVGDRVTITCRASQSLSTYLDWYQQKPGKAPKLLIYAASSLQSGVPSRFSGSGSGTDFTLTISSLQPEDFATYYCQAWDDSLSAGVFGGGTKVEIK

SEQ ID NO: 1981 - protein, 106 aa, Artificial Sequence
  Description of Artificial Sequence: Synthetic polypeptide
DIQMTQSPSSLSASVGDRVTITCRASQAISSYLDWYQQKPGKAPKLLIYAASSLQSGVPSRFSGSGSGTDFTLTISSLQPEDFATYYCQQSDSFLTFGGGTKVEIK

SEQ ID NO: 1982 - protein, 108 aa, Artificial Sequence
  Description of Artificial Sequence: Synthetic polypeptide
DIQMTQSPSSLSASVGDRVTITCRASQAVSRYLAWYQQKPGKAPKLLIYAASSLQSGVPSRFSGSGSGTDFTLTISSLQPEDFATYYCSPYASPPPFVFGGGTKVEIK

SEQ ID NO: 1983 - protein, 11 aa, Artificial Sequence
  Description of Artificial Sequence: Synthetic peptide
RASQYVGTYLN

SEQ ID NO: 1984 - protein, 11 aa, Artificial Sequence
  Description of Artificial Sequence: Synthetic peptide
  MOD_RES (1)..(1): Arg or Gln
  MOD_RES (5)..(5): Tyr or Ser
  MOD_RES (7)..(7): Gly, Arg, Thr, Ala, Pro or Ser
  MOD_RES (9)..(9): Tyr, Lys or Asn
  MOD_RES (11)..(11): Ala or Ser
XASQXVXSXLX

SEQ ID NO: 1985 - protein, 7 aa, Artificial Sequence
  Description of Artificial Sequence: Synthetic peptide
DASNRAT

SEQ ID NO: 1986 - protein, 7 aa, Artificial Sequence
  Description of Artificial Sequence: Synthetic peptide
  MOD_RES (2)..(2): Ala or Val
  MOD_RES (7)..(7): Thr, Ala or Ser
DXSNRAX

SEQ ID NO: 1987 - protein, 10 aa, Artificial Sequence
  Description of Artificial Sequence: Synthetic peptide
QVWDSSPPVA

SEQ ID NO: 1988 - protein, 10 aa, Artificial Sequence
  Description of Artificial Sequence: Synthetic peptide
  MOD_RES (2)..(2): Val or Ala
  MOD_RES (3)..(3): Trp or Tyr
  MOD_RES (5)..(5): Ser or Thr
  MOD_RES (6)..(6): Ser, Glu, Ala, Asp, Gln or Tyr
  MOD_RES (7)..(7): Pro, Thr, Asp, Ala, His or Asn
  MOD_RES (8)..(8): Pro, Asp, Gly, Tyr, Ala, His, Arg or Ser
  MOD_RES (10)..(10): Ala, Val, Thr or Met
QXXDXXXXVX

SEQ ID NO: 1989 - protein, 5 aa, Artificial Sequence
  Description of Artificial Sequence: Synthetic peptide
SYGMY

SEQ ID NO: 1990 - protein, 5 aa, Artificial Sequence
  Description of Artificial Sequence: Synthetic peptide
  MOD_RES (1)..(1): Ser or Arg
  MOD_RES (3)..(3): Gly, Thr, Ala or Ser
  MOD_RES (4)..(4): Ile, Tyr, Phe or Asn
  MOD_RES (5)..(5): Tyr, Thr, Asn or Ser
XYXXX

SEQ ID NO: 1991 - protein, 17 aa, Artificial Sequence
  Description of Artificial Sequence: Synthetic peptide
WIDPGSGGTKYNEKFKG

SEQ ID NO: 1992 - protein, 17 aa, Artificial Sequence
  Description of Artificial Sequence: Synthetic peptide
  MOD_RES (1)..(1): Trp, Arg or Tyr
  MOD_RES (6)..(6): Ser or Asn
  MOD_RES (10)..(10): Lys, Ser, Asn or Arg
  MOD_RES (13)..(13): Glu or Gln
  MOD_RES (16)..(16): Lys or Gln
  MOD_RES (17)..(17): Gly or Ser
XIDPGXGGTXYNXKFXX

SEQ ID NO: 1993 - protein, 9 aa, Artificial Sequence
  Description of Artificial Sequence: Synthetic peptide
ERYGYYFDY

SEQ ID NO: 1994 - protein, 9 aa, Artificial Sequence
  Description of Artificial Sequence: Synthetic peptide
  MOD_RES (1)..(1): Glu, His, Ser, Ala, Pro, Asp, Gln or Tyr
  MOD_RES (2)..(2): Arg, Gly, Asn, Asp, His or Ser
  MOD_RES (3)..(3): Tyr, Ser, Val, Ala, Asp or Phe
  MOD_RES (4)..(4): Gly, Thr, Ala or Ser
  MOD_RES (6)..(6): Tyr or Ser
  MOD_RES (7)..(7): Phe, Arg or Leu
XXXXYXXDY

SEQ ID NO: 1995 - protein, 9 aa, Artificial Sequence
  Description of Artificial Sequence: Synthetic peptide
  MOD_RES (1)..(1): Glu, Gly, Asp, Tyr, Ser, Arg, His, Lys, Asn or Gln
  MOD_RES (2)..(2): Arg, Gly, Tyr, Ser, Asn, Asp, Leu, Lys, Ile, Glu or Phe
  MOD_RES (3)..(3): Tyr, Ser, Leu, Gly, Phe, Thr, Ala, Asp, His, Ile, Asn, Pro, Arg or Val
  MOD_RES (4)..(4): Gly, Ser, Pro, Asp, Ala, Arg, His, Tyr, Glu or Gln
  MOD_RES (5)..(5): Tyr, Ser, Asn, Phe, Ile or Thr
  MOD_RES (6)..(6): Tyr, His, Ala, Ser, Asp or Pro
  MOD_RES (7)..(7): Phe or Leu
XXXXXXXDY

SEQ ID NO: 1996 - protein, 17 aa, Artificial Sequence
  Description of Artificial Sequence: Synthetic peptide
  MOD_RES (10)..(10): Lys or Asn
  MOD_RES (12)..(12): Asn, Ala, Ser, Lys, Thr, Asp, Glu, Gln or Tyr
  MOD_RES (13)..(13): Glu, Gln, Asp or His
WIDPGSGGTXYXXKFKG

SEQ ID NO: 1997 - protein, 9 aa, Artificial Sequence
  Description of Artificial Sequence: Synthetic peptide
  MOD_RES (1)..(1): Glu, Asp or Tyr
  MOD_RES (2)..(2): Arg or Lys
  MOD_RES (3)..(3): Tyr or Ser
  MOD_RES (4)..(4): Gly, Ser or Arg
  MOD_RES (5)..(5): Tyr or Trp
XXXXXYFDY

SEQ ID NO: 1998 - protein, 11 aa, Artificial Sequence
  Description of Artificial Sequence: Synthetic peptide
  MOD_RES (11)..(11): Asn, Ala, Asp or Thr
RASQYVGSYLX

SEQ ID NO: 1999 - protein, 7 aa, Artificial Sequence
  Description of Artificial Sequence: Synthetic peptide
  MOD_RES (1)..(1): Asp or Gly
  MOD_RES (7)..(7): Thr or Ala
XASNRAX

SEQ ID NO: 2000 - protein, 10 aa, Artificial Sequence
  Description of Artificial Sequence: Synthetic peptide
  MOD_RES (2)..(2): Val, Gln, Ala, Ser, Leu, Glu or Pro
  MOD_RES (3)..(3): Trp or Tyr
  MOD_RES (7)..(7): Pro, Ser or Thr
  MOD_RES (8)..(8): Pro, Asp, Ala or His
QXXDSSXXVV

SEQ ID NO: 2001 - protein, 13 aa, Artificial Sequence
  Description of Artificial Sequence: Synthetic peptide
KASGYTFSSYGMY

SEQ ID NO: 2002 - protein, 13 aa, Artificial Sequence
  Description of Artificial Sequence: Synthetic peptide
  MOD_RES (1)..(1): Lys, Ala, Glu or Thr
  MOD_RES (5)..(5): Tyr or Phe
  MOD_RES (6)..(6): Ile, Tyr, Phe or Asn
  MOD_RES (8)..(8): Ser or Thr
  MOD_RES (9)..(9): Ser, Ala, Asp, Asn, Thr or Tyr
  MOD_RES (10)..(10): Tyr or Phe
  MOD_RES (11)..(11): Gly, Tyr or Ala
  MOD_RES (12)..(12): Met or Ile
  MOD_RES (13)..(13): Tyr, His, Asn, Pro, Ser or Thr
XASGXXFXXXXXX

SEQ ID NO: 2003 - protein, 20 aa, Artificial Sequence
  Description of Artificial Sequence: Synthetic peptide
WIDPGSGGTKYNEKFKGKAT

SEQ ID NO: 2004 - protein, 20 aa, Artificial Sequence
  Description of Artificial Sequence: Synthetic peptide
  MOD_RES (1)..(1): Trp or Arg
  MOD_RES (3)..(3): Asp or Asn
  MOD_RES (5)..(5): Gly, Asp, Asn or Ser
  MOD_RES (6)..(6): Ser or Asn
  MOD_RES (10)..(10): Lys or Asn
  MOD_RES (13)..(13): Glu or Gln
  MOD_RES (16)..(16): Lys or Gln
  MOD_RES (18)..(18): Lys or Arg
  MOD_RES (19)..(19): Ala or Val
XIXPXXGGTXYNXKFXGXXT

SEQ ID NO: 2005 - protein, 14 aa, Artificial Sequence
  Description of Artificial Sequence: Synthetic peptide
ITCRASQYVGTYLN

SEQ ID NO: 2006 - protein, 14 aa, Artificial Sequence
  Description of Artificial Sequence: Synthetic peptide
  MOD_RES (1)..(1): Ile or Leu
  MOD_RES (2)..(2): Thr or Ser
  MOD_RES (4)..(4): Arg or Lys
  MOD_RES (8)..(8): Tyr, Ala, Asp, Asn, Ser or Thr
  MOD_RES (9)..(9): Val or Ile
  MOD_RES (10)..(10): Gly, Asp, Asn or Ser
  MOD_RES (11)..(11): Thr, Asn or Ser
  MOD_RES (12)..(12): Tyr, Trp, Asn, Ser or Thr
  MOD_RES (13)..(13): Leu or Val
  MOD_RES (14)..(14): Asn, Ala, Asp or Thr
XXCXASQXXXXXXX

SEQ ID NO: 2007 - protein, 10 aa, Artificial Sequence
  Description of Artificial Sequence: Synthetic peptide
DASNRATGIP

SEQ ID NO: 2008 - protein, 10 aa, Artificial Sequence
  Description of Artificial Sequence: Synthetic peptide
  MOD_RES (1)..(1): Asp, Gly or Glu
  MOD_RES (2)..(2): Ala or Thr
  MOD_RES (4)..(4): Asn, Ser or Thr
  MOD_RES (7)..(7): Thr or Ala
  MOD_RES (9)..(9): Ile or Val
XXSXRAXGXP

SEQ ID NO: 2009 - protein, 10 aa, Artificial Sequence
  Description of Artificial Sequence: Synthetic peptide
  MOD_RES (2)..(2): Val, Arg, Gly, Leu, Pro, Thr, Asp, Glu, His, Ile, Lys, Met, Asn, Gln or Ser
  MOD_RES (3)..(3): Trp or Tyr
  MOD_RES (4)..(4): Asp, Gly, Asn or Ser
  MOD_RES (5)..(6): Ser, Asn or Thr
  MOD_RES (7)..(7): Pro, Ala, Asp, Phe, His, Ile, Leu, Asn, Ser, Thr, Val or Tyr
  MOD_RES (8)..(8): Pro, Arg, Ala, Gly, Thr, Asp, Glu, His, Lys, Asn, Gln or Ser
  MOD_RES (9)..(9): Val, Asp, Phe, Gly, His, Ile, Leu, Asn, Arg, Ser or Tyr
  MOD_RES (10)..(10): Ala, Ile, Leu, Pro, Thr or Val
QXXXXXXXXX

SEQ ID NO: 2010 - protein, 108 aa, Artificial Sequence; identical to SEQ ID NO: 813
  Description of Artificial Sequence: Synthetic polypeptide

SEQ ID NO: 2011 - protein, 108 aa, Artificial Sequence
  Description of Artificial Sequence: Synthetic consensus sequence
  MOD_RES (24)..(24): Arg or Gln
  MOD_RES (29)..(29): Val or Ile
  MOD_RES (31)..(31): Thr or Ser
  MOD_RES (34)..(34): Asn, Ser or Thr
  MOD_RES (52)..(52): Ser or Ala
  MOD_RES (56)..(56): Thr, Ala or Ser
  MOD_RES (90)..(90): Val, Ala or Gly
  MOD_RES (91)..(91): Trp or Tyr
  MOD_RES (92)..(92): Asp, Gly, Ser or Asn
  MOD_RES (93)..(93): Ser, Thr or Asn
  MOD_RES (94)..(94): Ser, Asn, Tyr, Asp or Thr
  MOD_RES (95)..(95): Pro, His, Ala, Asp or Ser
  MOD_RES (96)..(96): Pro, Ala, Ser, Arg, Gly or Asp
  MOD_RES (97)..(97): Val, Leu or Ser
  MOD_RES (98)..(98): Ala, Val, Met, Ile, Leu or Thr
  MOD_RES (101)..(101): Gly or Asp
EIVLTQSPATLSLSPGERATITCXASQYXGXYLXWYQQKPGQAPRLLIYDAXNRAXGIPARFSGSGSGTDFTLTISSLEPEDFAVYYCQXXXXXXXXXFGXGTKVEIK

SEQ ID NO: 2012 - protein, 119 aa, Artificial Sequence
  Description of Artificial Sequence: Synthetic polypeptide
EVQLLESGGGLVQPGGSLRLSCKASGYTFSSYGMYWVRQAPGKGLEWIGWIDPGSGGTKYNEKFKGKATISRDNSKNTLYLQMNSLRAEDTAVYYCARERYGYYFDYWGQGTLVTVSSA

SEQ ID NO: 2013 - protein, 119 aa, Artificial Sequence
  Description of Artificial Sequence: Synthetic consensus sequence
  MOD_RES (1)..(1): Glu or Gln
  MOD_RES (23)..(23): Lys, Ala, Glu, Gln or Thr
  MOD_RES (26)..(26): Gly or Asp
  MOD_RES (27)..(27): Tyr or Phe
  MOD_RES (28)..(28): Thr or Ser
  MOD_RES (30)..(30): Ser or Thr
  MOD_RES (31)..(31): Ser, Arg, Ala, Asn, Asp, Thr or Tyr
  MOD_RES (32)..(32): Tyr or Phe
  MOD_RES (33)..(33): Gly, Ser, Thr, Ala, Tyr, Gln or Trp
  MOD_RES (34)..(34): Met, Ile, Phe, Tyr, Asn or Gln
  MOD_RES (35)..(35): Tyr, Ser, Asn, Thr, His or Ile
  MOD_RES (37)..(37): Val or Met
  MOD_RES (47)..(47): Trp or Ser
  MOD_RES (48)..(48): Ile or Val
  MOD_RES (50)..(50): Trp, Arg, Tyr, Ser, Leu or Gln
  MOD_RES (51)..(51): Ile or Asp
  MOD_RES (52)..(52): Asp, Asn, Arg, Gln or Ser
  MOD_RES (54)..(54): Gly, Arg, Ser, Lys, Asn or Asp
  MOD_RES (55)..(55): Ser, Asn, Gln, Gly or Tyr
  MOD_RES (56)..(56): Gly or Arg
  MOD_RES (57)..(57): Gly, Trp or Ser
  MOD_RES (58)..(58): Thr or His
  MOD_RES (59)..(59): Lys, Arg, Asn, Gln, Ser or Tyr
  MOD_RES (60)..(60): Tyr, Val or Gln
  MOD_RES (61)..(61): Asn, Gln, Ala, Glu or Asp
  MOD_RES (62)..(62): Glu, Gln, Asp, Pro, Arg or His
  MOD_RES (63)..(63): Lys, Gln or Ser
  MOD_RES (64)..(64): Phe or Val
  MOD_RES (65)..(65): Lys, Gln or Glu
  MOD_RES (66)..(66): Gly or Ser
  MOD_RES (67)..(67): Lys, Arg or Gln
  MOD_RES (68)..(68): Ala, Phe or Val
  MOD_RES (99)..(99): Glu, Tyr, Ala, Gly, Ser, His, Gln or Asp
  MOD_RES (100)..(100): Arg, Lys, Phe, Asn or His
  MOD_RES (101)..(101): Tyr, Val, Ser, Asp, Ile, Leu, Phe or Ala
  MOD_RES (102)..(102): Gly or Tyr
  MOD_RES (104)..(104): Tyr, Ser, Asn or Asp
  MOD_RES (105)..(105): Phe or Leu
XVQLLESGGGLVQPGGSLRLSCXASXXXFXXXXXXWXRQAPGKGLEXXGXXXPXXXXXXXXXXXXXXXTISRDNSKNTLYLQMNSLRAEDTAVYYCARXXXXYXXDYWGQGTLVTVSSA

What is claimed:

1. An isolated antibody or antigen binding fragment thereof, comprising at least one CDR and one of a variant junctional region (vJR) flanking the N (JR_{N}) and/or C (JR_{C}) terminal of said CDR, wherein each of JRN and JRC region comprises from 1-3 amino acids, and wherein at least one of said vJR comprises
a) at least one framework residue position in one of said JRN and JRC region comprises a variant amino acid that is selected from a group of up to of from 1-6 different amino acids; and,
b) said CDR comprises at least one variant amino acid residue that comprises any of the naturally occurring amino acids.

2. The antibody of claim 1, further comprising at least one additional CDR, wherein said CDR comprises a JRN and JRC region.

3. An isolated nucleic acid molecule encoding an immunoglobulin chain of the antibody or fragment of claim 1.

4. An isolated vector that comprises the nucleic acid of claim 3.

5. The vector according to claim 4 that is a replicable expression vector.

6. A host cell comprising the vector according to claim 4.

7. A plurality of antibody variable domains, wherein each of the antibody variable domain comprises comprising at least one CDR and one of a variant junctional region (vJR) flanking the N (JR_{N}) and/or C (JR_{C}) terminal of said CDR, wherein each of JR_{N} and JR_{C} region comprises from 1-3 amino acids, and wherein at least one of said vJR comprises
a) at least one framework residue position in one of said JRN and JRC region comprises a variant amino acid that is selected from a group of up to of from 1-6 different amino acids; and,
b) said at least one CDR comprises at least one variant amino acid residue that comprises any of the naturally occurring amino acids.

8. A method of generating a composition comprising a plurality of variant antibody molecules or antigen binding fragments thereof, wherein the method comprises generating a plurality of polypeptides comprising:
(i) CDRL1 comprising a first consensus hypervariable sequence or variant thereof comprising substitution at one or more positions compared to a corresponding consensus hypervariable sequence;
(ii) CDRL2 comprising a second consensus hypervariable sequence or variant thereof comprising substitution at one or more positions compared to a corresponding consensus hypervariable sequence;
(iii) CDRL3 comprising a third consensus hypervariable sequence or variant thereof; and,
(iv) a variant framework sequence designated JRNCDR1JRC wherein said variant framework sequence comprises substituting at one or more amino acid residues in at least one of said JR_{N} or JR_{C} relative to a corresponding consensus.

9. A method of selecting for an antigen binding variable domain that binds to a target antigen from a library of antibody variable domains comprising:
(a) contacting the plurality of antibody variable domains of claim 7 with a target antigen;
(b) separating one or more polypeptides that specifically bind to the target antigen from polypeptides that do not specifically bind to the target antigen, recovering the one or more polypeptides that specifically bind to the target antigen, and incubating the one or more polypeptides that specifically bind to the target antigen in a series of solutions comprising decreasing amounts of the target antigen in a concentration from about 0.1 nM to about 1000 nM; and,
(c) selecting the one or more polypeptides that specifically bind to the target antigen and that can bind to the lowest concentration of the target antigen or that have an affinity of about 0.1 nM to about 200 nM.

10. A method of selecting for a variant antibody that binds to a target antigen from a library of antibodies; comprising:
(a) isolating one or more antibodies that specifically bind to the target antigen by contacting a library comprising a plurality of antibody variable domains of claim 7 with an immobilized target antigen under conditions suitable for binding;
(b) separating the one or more antibodies that specifically bind to the target antigen from antibodies that do not specifically bind to the target antigen, and recovering the one or more variant antibodies that specifically bind to the target antigen to obtain a subpopulation enriched for the one or more antibodies that specifically bind to the target antigen; and,
(c) optionally, repeating steps (a)-(b) at least twice, each repetition using the subpopulation enriched for the one or more variant antibodies that specifically bind to the target antigen obtained from the previous round of selection.

11. The method of claim 10, further comprising: (d) incubating the subpopulation with a concentration of labeled target antigen in the range of about 0.1 nM to about 1000 nM to form a mixture, under conditions suitable for binding;
(e) contacting the mixture with an immobilized agent that binds to the label on the target antigen;
(f) detecting the one or more polypeptides that specifically bind to the labeled target antigen, and recovering the one or more variant antibodies that specifically bind to the labeled target antigen from the labeled target antigen; and,
(g) optionally, repeating steps (d) to (f) at least twice, each repetition using the subpopulation enriched for the one or more variant antibodies that specifically bind to the labeled target antigen obtained from the previous round of selection, and using a lower concentration of labeled target antigen than the previous round of selection.

12. The method of claim 11, further comprising adding an excess of unlabeled target antigen to the mixture and incubating the mixture for a period of time sufficient to recover one or more variant antibody that specifically bind to the target antigen with low affinity.

13. A method of isolating one or more variant antibodies that specifically bind to a target antigen with high affinity, comprising:
(a) contacting a library comprising a plurality of antibodies of claim 7 with a target antigen at a concentration of at least about 0.1 nM to about 1000 nM to isolate one or more variant antibodies that specifically bind to the target antigen;
(b) recovering the one or more variant antibodies that specifically bind to the target antigen from the target antigen to obtain a subpopulation enriched for the one or more polypeptides that specifically bind to the target antigen; and,
(c) optionally repeating steps (a) and (b) at least twice, each repetition using the subpopulation obtained from the previous round of selection and using a decreased concentration of target antigen from that used in the previous round to isolate one or more variant antibodies that bind specifically to the target antigen at the lowest concentration of target antigen.
